United States Patent Application Publication US 2026/0055430 A1 - sequence listing, part 7

SEQ ID NO: 30100 - DNA, 260 bp, Unknown
  Description of Unknown: RightRegion for integrase B4101 sequence
gctcgcgctgtgattcaggagtgtacttgggacggggagcggctttttattacgctctaaacctcactatttcataatggtggggttcgggacgcatacgcagtgcactcttaaccaaatcgcggatagtaacttcattctttccctccacattgcggtttctggcttccagtcgaaccagatttgcgatgttttgaatctgcaattccgcagaatcctcaatcgtaatcacacgctcttctttcggaatgaaattagac

SEQ ID NO: 30101 - DNA, 260 bp, Unknown
  Description of Unknown: RightRegion for integrase B4102 sequence
gctcgcgctgttattcaggagtgtacttgggacggggagcggctttttattacgctctaaacctcactattttataatgttgggtttcggccgcatacgcaaagctgcgcggatcagatcgcggatcgtaatttctgttcctgattccagatttgcctcttttgcttccagccgcaccagattctccacaccctggatctgcagctctgcattgtcttcgatggttatgatgcgctcgccctttggaatgtaggcggaaa

SEQ ID NO: 30102 - DNA, 260 bp, Unknown
  Description of Unknown: RightRegion for integrase B4103 sequence
aaagcagggatcgggcgatacatagagaatgttttttccctggaaatccaatataaatagccatatccaacgtatctgtacctatgaattagcccacctcgaaatgattgccgccatcgtccgccagctcaccaaaggcttaagtgctgaagaacttgaggccgccggtttcgctccttactatgtcgatcacacggccgggatctggccgcaggcagccggcggtattccgtttaatgcctgtgaattccagagcaaag

SEQ ID NO: 30103 - DNA, 260 bp, Unknown
  Description of Unknown: RightRegion for integrase B4104 sequence
gctcgcgctgtgattcaggagtgtacttgggacggggagcggctttttattacgctctaaacctcactatttcataatggtggggttccggtctcatacgaagagccgtcctgataagatctcttattgtaattggagtaaccccatcggtatttgcatttcttgtctcaagccttactatatttttagctcccagaagctgcagctccgctgagtcttcaattgtaataattctctcatcatcaggaatatattgtgac

SEQ ID NO: 30104 - DNA, 260 bp, Unknown
  Description of Unknown: RightRegion for integrase B4105 sequence
ataggagatgggttcggattatttgttttcttcggaaaattagcgtttgcgaagcaatgaaagccccagtggggcttttaagcgacggaacggtctgcgttagcagatggaggggctttgccccgacaagttccatgcaggtgtccgtggaagatgaaatccgaaatcatagattgaccgacacaaatcatgcaatgatttcaggaggacatgaatgtgaagtacgatgcaagagcttgccatatcaacatggacaccgg

SEQ ID NO: 30105 - DNA, 260 bp, Unknown
  Description of Unknown: RightRegion for integrase B4106 sequence
gctcgcgctgtaatccaggagtgtacttgggacggggagcggctttttattacgctctaaacctcactatttcataatggcggggttccggacgcatacgcaatgctgtgcggatcagatcccggattgttaccggctggacgccctccatatttgcattccgtgtttctaaacgtaccagatttctgattccctgtatttgaagttccgcggaatcctcaatcgttataactctctcatcctccgggatatactgtgat

SEQ ID NO: 30106 - DNA, 260 bp, Unknown
  Description of Unknown: RightRegion for integrase B4107 sequence
cgtatgagccacttagagtgcgatggaagggagtcgaacccccggcctactgattcgtagcgcacgccgggcgattccctcaatttttggaagttacattttaacgttatttctttgcgatgtatcgcaggttttgaacttcgagtttctgcaccctttgtccgattttgcaacaatttgcaccctttgcacgttttgaaaccgtgcaagaaccgtgcagaaaccgtgcacttactcccggacaaactaaaaaccacttc

SEQ ID NO: 30107 - DNA, 109 bp, Unknown
  Description of Unknown: RightRegion for integrase B4108 sequence
gtgaaggacgttataaaaaaatgtgcatgggacggggagtccctttctattatgctttgatgctcacttttttatcttgcgtccttcagggcgcattcgcaacgcagat

SEQ ID NO: 30108 - DNA, 87 bp, Unknown
  Description of Unknown: RightRegion for integrase B4109 sequence
gctcgcgctgtgatccaggagtgtacttgggacggggagcggctttttattacgctgtaaacctcactatttcataatggtggggct

SEQ ID NO: 30109 - DNA, 109 bp, Unknown; identical to SEQ ID NO: 30059
  Description of Unknown: RightRegion for integrase B4110 sequence

SEQ ID NO: 30110 - DNA, 260 bp, Unknown
  Description of Unknown: RightRegion for integrase B4111 sequence
ctcgaacctacgttcaaggaaactcaaaaaatgcccgttttaattgaaattagaggataaaactatgctttttactactaaaaagtgttcgtgcgaggttaaacaaacgcatatttgcctatagaagttacataatccggaataacaacttccgtaatcgttttgtcgtaaacaccttctatctcacaaaatttcaaatttgacgaaaacttggaattcttaagttcgtcttttatcttccactttgccgtatatgtttc

SEQ ID NO: 30111 - DNA, 140 bp, Unknown
  Description of Unknown: RightRegion for integrase B4112 sequence
gctcgcgctgtgatccaagagtgtacttgggacggggagcgactttttattacgctctaaacctcactatttcataatggtggggttctttgtttgtgctcagcgaatagagccaaatgagtacggcgtttttatcctgt

SEQ ID NO: 30112 - DNA, 109 bp, Unknown; identical to SEQ ID NO: 30059
  Description of Unknown: RightRegion for integrase B4113 sequence

SEQ ID NO: 30113 - DNA, 260 bp, Unknown
  Description of Unknown: RightRegion for integrase B4114 sequence
gctcgcgctgtgattcaggagtgtacttgggacggggagcggctttttattacgctctaaacctcactatttcataatggtggggttaggacgcattcgaagagatgatttaattaagtctcttattgtaatctgcccggcacctgaagcatttgcatttctagtctccagactaaccagattatcaattcctgcaatctgaagctctgctgaatcctcaattgtaataattctttcatccttaggaataaaattggaaa

SEQ ID NO: 30114 - DNA, 109 bp, Unknown
  Description of Unknown: RightRegion for integrase B4115 sequence
gctcgcgctgtaattcaggagtgtacttgggacggagagcggctttttattacgctctaaacctcactattttataatggtggggttccggtctcatacgaagtgctga

SEQ ID NO: 30115 - DNA, 260 bp, Unknown
  Description of Unknown: RightRegion for integrase B4116 sequence
tataaaggcgtatctgtcgatgattttaatctgacagtgttcccgaaaatgcctttataatcacgaatgttatagtgcgtgtacaaacgaaatcttcggcggctatccgtggtatcacaacgaggaaattctctacaaaccgggcttcccgtgggcttgctcgaccgcatcccgtgcggatctgctctgcgacgggatactgggcgacattgacccgaatgattatgtcaacttctgctgtaacgaaacgctgaagaaca

SEQ ID NO: 30116 - DNA, 260 bp, Unknown
  Description of Unknown: RightRegion for integrase B4117 sequence
gctcgcgctgtgattcaggagtgtacttgggacggggagcggctttttattacgctctaaacctcactatttcataatggtggggctccggtctcatacgaagagccgtcctgataagatctcttattgtaattggagtaaccccatcggtatttgcatttctggtctcaagccttactatatttttagctcccagaagctgcagctccgctgagtcttcaattgtaataattctctcatcatcaggaatatattgtgac

SEQ ID NO: 30117 - DNA, 260 bp, Unknown
  Description of Unknown: RightRegion for integrase B4118 sequence
gtaaatgagaaagatgatatttgggtgacttttaaagatggcacagaaatcaaagcataaatggatatttggaaatgcaagagagaaacgacatggctttccgggaaaacggaatatagtatgttaatgtacagaatccatctattattaacttaagcttcacagttgataccccgctgatttatctttattagtaatccgcgaaataaaaatagtatgaactcattccgttttgtataataaaagtaaggaaaatccac

SEQ ID NO: 30118 - DNA, 260 bp, Unknown
  Description of Unknown: RightRegion for integrase B4119 sequence
acgatagtcgtcttgccttatggtttcgtacttgcgacccagattaaggataggctttgagcctgtcctttttcttttggtagtcggtagtccgttttaacgaattttccttatatatacatgtaatgcgagggagcgacgagattgcgctttgaatccctttactttttggaaaaatcttcttagtttttacgaactaccagtactaccagatagccaaaggccttgtaaatcaaggactttcttcggtagcaggctca

SEQ ID NO: 30119 - DNA, 109 bp, Unknown
  Description of Unknown: RightRegion for integrase B4120 sequence
gaaggagataaaatcacattcctgcttgatatcttcccaaaaatccaggaaaatacataatgataacatccatgtgccagttcttccgttcccacatcattcagcaccg

SEQ ID NO: 30120 - DNA, 260 bp, Unknown
  Description of Unknown: RightRegion for integrase B4121 sequence
cgaatggggaacgaagccacctttgtcttggatattttccccagaattcagccaaattaattaatgataacatctatgtacaaacgaactcagtcatctggaaatggtatccactattgtacatcagcttacccgggacctttccatggaggaaattgagaaatccggattcggaccgtattatatcgatcacacagtgggagtctggccacaggcagcaggtggcgtaccatttaatgcatgtgaatttcagagtaaag

SEQ ID NO: 30121 - DNA, 260 bp, Unknown
  Description of Unknown: RightRegion for integrase B4122 sequence
gctcgcgctgtaatccaggagtgtacttgggacggggagcggctttttattacgctctaaacctcactatttcataatggtggggttccggtctcatacgaagagccgtcctgataagatctcttattgtaattggagtaaccccatcggtatttgcatttcttgtctcaagccttactatatttttagctcccagaagctgcagctccgctgagtcttcaattgtaataattctctcatcatcaggaatatattgtgac

SEQ ID NO: 30122 - DNA, 260 bp, Unknown
  Description of Unknown: RightRegion for integrase B4123 sequence
cgtatagaattcagccgcgaaaacaacgacgaattcatactggacacgtatttgaagtgattcgattatttttttaaactatgtgggtatcatgtgtgtgcacctttgatagcgccatgatgatacctacctgattaaaaggaggaaatataaatgagagtagtgtggaaagatagcgcccaactggcgaataaacaagtgaagaaagaggttaagaaagtcgataagaagaatagtaaaactgcatagctgaagaaaaa

SEQ ID NO: 30123 - DNA, 260 bp, Unknown
  Description of Unknown: RightRegion for integrase B4124 sequence
gctcgcgctgtaattcaggagtgtacttgggacggggagcggctttttattacgctctaaacctcactatttcataatggtggggttccgcccgcaatataaaaaagtgaaagcaaatttacggaggtgtctttatgaatgtgatctatcgtgtgcacggtgctggtggcttctatatggaaacgcagagccaggaccaggctttccgagctgcccggcaggaagctgcgacatccggccagatggctctggtatccttt

SEQ ID NO: 30124 - DNA, 260 bp, Unknown
  Description of Unknown: RightRegion for integrase B4125 sequence
gctcgcgctgtgattcaggagtgtacttgggacggggagcggctttttattacgctctaaacctcactatttcataatggtggggttccgcccgcaatataaaaaagtgaatataaaataaaggaggtgattcagcgtggcttgtaaaattaaaacgctcctgcagtgcaagcactgcaggcatgatcttgagtttgcgacggtgtgtggtaatcgtcgtgtgccgcttctctggtgtccggactgcgatattttgtatc

SEQ ID NO: 30125 - DNA, 260 bp, Unknown
  Description of Unknown: RightRegion for integrase B4126 sequence
gtccacagcaaaaaggacatccgggtgaccttcaaggacggtaccgagatcaaagcataatcccatagacgcagaaacgcctctgaaccacatcggctcggaggcgttttttgttatctcattccccagagaaaacagtcaattttctttgtgctgcttatccagctataggacggcaaggctttgtcgaaggcatcgatgcattcttttccgttttgagttttaaggaagtctttataccacgcctcgattctcgcata

SEQ ID NO: 30126 - DNA, 260 bp, Unknown
  Description of Unknown: RightRegion for integrase B4127 sequence
cgcaaggggaatgaagccacctttgttttggatattttccccagaattcagtcaaattaattaatgataacatctatgtacaaacgaatcagctcatagctgttatcattttaattatgcaataaagctttgacaataccgtacaatgtgtggtattgtttcaatatgaaggaggtaacaattgtgaatattacagaaatgagaaattatataggagtctccagagcagagttctccaggcgctataacattccgctccg

SEQ ID NO: 30127 - DNA, 141 bp, Unknown
  Description of Unknown: RightRegion for integrase B4128 sequence
gctcgcgctgtaattcaggagtgtacttgggacggggagcggctttttattaagctctaaacctcactatttcataatggtgggggtccggtctcatacgaagtgctgacttaatcaaatctctgatggttacagcccctt

SEQ ID NO: 30128 - DNA, 260 bp, Unknown
  Description of Unknown: RightRegion for integrase B4129 sequence
cggatggggaacgaagccacctttgtcctggatattttccccagaattcaatcaaattaattaatgataacatctatgtacaaacgaatctgctcataaatgttatcattttaagaaagttattaagagacgaaaaattgctttcgaagaatgatgttgtgaggcagctgttagagcgagctgtcttagaagattcaaaaaaggaactctgtaacatagagttccttttttattcctttagattgcaatcaggtctttcc

SEQ ID NO: 30129 - DNA, 260 bp, Unknown
  Description of Unknown: RightRegion for integrase B4130 sequence
gctcgcgctgtaattcaggagtgtacttgggacggggagcggctttttattacgctctaaacctcactatttcataatggtggggttccggtctcatacgaagagccgtcctgataagatctcttattgtaattggagtaaccccatcggtatttgcatttctggtctcaagccttactatatttttagctcccagaagctgcagctccgctgagtcttcaattgtaataattctctcatcatcaggaatatattgtgac

SEQ ID NO: 30130 - DNA, 260 bp, Unknown
  Description of Unknown: RightRegion for integrase B4131 sequence
gctcgcgctgtaattcaggagtgtacttgggacggggagcggctttttattacgctctaaacctcactatttcataatggtggggttcggccgcatacgcaaagctgcgcggatcagatcgcggatcgtaatttctgttcctgattccagatttgcctcttttgcttccagccgcaccagattctccacaccctggatctgcagctctgcattgtcttcgatggttatgatgcgctcgccctttggaatgtagacggaaa

SEQ ID NO: 30131 - DNA, 109 bp, Unknown
  Description of Unknown: RightRegion for integrase B4132 sequence
gtggcgctttctggtggagctgatgggagtcgaacccatgtccgaaaagaaattagttagagtatctccgggcgcagtatgtttattggatttcccttggtgcgggcga

SEQ ID NO: 30132 - DNA, 109 bp, Unknown
  Description of Unknown: RightRegion for integrase B4133 sequence
aaagcagggatcgggcgatacatagagaatgttttttctctggaaatccaatataaatagccatatccaacgtatctgtacctatgaattagcccaccttgaaatgatt

SEQ ID NO: 30133 - DNA, 260 bp, Unknown
  Description of Unknown: RightRegion for integrase B4134 sequence
ggacaaccaaaatatgagcaatccctaatggtgggcagaaaagaaattaggcatatataacagaggtaaaacttgtggaaaactctacttatataacggaatatataagaaaaggcggagctttatgccccgccctccatttttcttattcctctaatttttctcctttcgcatatttagataacttgaagtaaatgtcgtgcctaatcaaggtcttgatgtagccctgcttgttctctatgcccttcaaaaactttagg

SEQ ID NO: 30134 - DNA, 260 bp, Unknown
  Description of Unknown: RightRegion for integrase B4135 sequence
gctcgcgctgtaattcaggagtgtacttgggacggggagcggctttttattacgctctaaacctcactatttcataatggtggggttccggcctcatacgaagggccgcccggatcagctctccgatcccgatctccccggctccctctgcattggcatcccgagtctccagacgtaccagattttcgatgtggtttaactgcagctccgccgcgtcttcgatcgtgatcacgcgctctccgggcgggataaactctgag

SEQ ID NO: 30135 - DNA, 260 bp, Unknown
  Description of Unknown: RightRegion for integrase B4136 sequence
aaagcagggatcgggcgatacatagagaatgttttttccctggaaatccaatataaatagccatatccaacatatctgtacctatgaattagcccaccttgaaatgattgctgctatcgtccggcagcttaccagaggtttaagtgcggaagaacttgaatccgctggttttgctccttactatgttgaccacactgccggaatctggccgcaggcggcaggtggtatcccgtttaatgcatgtgaatttcaaagcaaag

SEQ ID NO: 30136 - DNA, 109 bp, Unknown
  Description of Unknown: RightRegion for integrase B4137 sequence
gctcgcgctgtgattcaagagtgtacttgggacggggagcggctttttattacgctctaaacctcactattttataatggtggggttccggtctcatacgaagtgctga

SEQ ID NO: 30137 - DNA, 260 bp, Unknown
  Description of Unknown: RightRegion for integrase B4138 sequence
gctcgcgctgtgattcaggagtgtacttgggacggggagcggctttttattacgctctaaacctcactattttataatggtggggctccaggatcattgtaggggaagtaagaggggcagaggccttagatatgcttcaggctatgaatacaggccatcccggttctttatctaccggtcacggcaacagtccccaggatatgctttcaaggttggaagtaatggtgcttatgggagcagagctgcctttagatgcgatc

SEQ ID NO: 30138 - DNA, 188 bp, Unknown
  Description of Unknown: RightRegion for integrase B4139 sequence
gtattacacgaacctttttactttgtcggcggctttgccgtcacaatatggttcaggtaataccgacagaaaagaacggatattctcacttgttgagagtgtccgttctttctttatgtcctgcggattgtccacggactgtccgtggacaatctgcggacagtcacagaatgcagctattttcactt

SEQ ID NO: 30139 - DNA, 260 bp, Unknown
  Description of Unknown: RightRegion for integrase B4140 sequence
gctcgcgctgtgattcaggagtgtacttgggacggggagcggctttttattacgctctaaacctcactattttataatggtggggttccggtctcatacgaagagccgtcctgataagatctcttattgtaattggagtaaccccatcggtatttgcatttcttgtctcaagccttactatatttttagctcccagaagctgcaactccgctgagtcttcaattgtaataattctctcatcatcaggaatatattgtgac

SEQ ID NO: 30140 - DNA, 260 bp, Unknown
  Description of Unknown: RightRegion for integrase B4141 sequence
ttcgtttttgctcccgattgctccaccattcagttcgtacccgaacccaattctctatgagaaagggttcgggtactttttgtttcacaagatgttctctatgccgagagtatgcagaacggtaaacaggaacgaacaaaggcaggataccaccatcacggtgacaccctgccttttgtgttacaaggatattctgggggcgattgctgcgcacaaagcgccttaagcccctgtgtttgcttcggtcagcacaaaggtca

SEQ ID NO: 30141 - DNA, 260 bp, Unknown
  Description of Unknown: RightRegion for integrase B4142 sequence
ccgggaattggaagatatatagagaattctttcagattggagattttcttaaagctgtgaacccgctgtttatgggcatttaacatcatatccaagggttaggagctaatgaattaggacactttgaaatgatcagcacaatggttcatcagcttacaagaaatctttcaatggaacagattaagggaactccttttgaagcctactatgtagatcatacagcagccgtatggcctcaggccgctggtggaattccattc

SEQ ID NO: 30142 - DNA, 260 bp, Unknown
  Description of Unknown: RightRegion for integrase B4143 sequence
gtcatcccgattggggatgggttcggatttcttctttttatctcaagtattgtggtgtgataaccaaaatgaatgaaaggagacagatcggaatcactccgatagttgcagaaagtactttataaccgacaccacaaggatgcgaggaacacaatgaacatgcaatccatatgctgaagcgcccgatcgagcaggccgagtgccccatgcgcgggagagcgcaaagcgccattcctaaccaatagggcaagagtcatctt

SEQ ID NO: 30143 - DNA, 260 bp, Unknown
  Description of Unknown: RightRegion for integrase B4144 sequence
gctcgcgctgtgattcaggagtgtacttgggacggggagcggctttttattacgctctaaacctcactatttcataatggtggggttccgcccgcatgataaaaaagtgaaagtaaatttacggaggtgtctttatgaatgtgatctatcgtgtgcacggtgctggtggcttctatatggaaacgcagagccaggaccaggctttccgagctgcccggcaggaagctgcggaatccggccagatgactctggtatctttt

SEQ ID NO: 30144 - DNA, 139 bp, Unknown
  Description of Unknown: RightRegion for integrase B4145 sequence
cggatggggaacgaagccacctttgtcctggatattttccccagaattcagtcaaattaattaatgataacatctatgtacaaacgaactcagtcatctggaaatggtatccactattgtacatcagcttacccgggac

SEQ ID NO: 30145 - DNA, 260 bp, Unknown
  Description of Unknown: RightRegion for integrase B4146 sequence
gggaaaggaaacgagattggttttcagctagacattttcccaaaaattcaagaaaaatgattaatgatatcttctatgtgctgacgaactggctcattgatgttatcattaattcagaaaagaaactcccggggaattaaccccgggatatttttatgcttttgcaagtacttaaatagcgatcaaatctttccaagtgttctcgccacactctccgtctaccaccagtactccatttctggacttctggtactgcttta

SEQ ID NO: 30146 - DNA, 260 bp, Unknown
  Description of Unknown: RightRegion for integrase B4147 sequence
gctcgcgctgtgattcaggagtgtacttgggacggggagcggctttttattacgctctaaacctcactatttcataatggtggggttctgcaagctttggtatggatatgctgacctgtatcgttccttttccgcttctggctccatctttatatgctttctgtacagattcgtcatggggatataccctggaacctttcggaagatccacaatctctccgcctcgttcagagatctgtaccagaccgcctttccagttc

SEQ ID NO: 30147 - DNA, 260 bp, Unknown
  Description of Unknown: RightRegion for integrase B4148 sequence
gctcgcgctgtgattcaggagtgtacttgggacggggagcggctttttattacgctctaaacctcactatttcataatggtggggtccggccgcattcgcaaagatgccttaatcaagtcctgcatagtaatctcattctctccctccatgtttgcattcctcgtttctagtcgaacaagattctctacatgaaaaagctggagttctgctgaatcctctatcgtaatcactcttttcctcttccctatatattctgcaa

SEQ ID NO: 30148 - DNA, 260 bp, Unknown
  Description of Unknown: RightRegion for integrase B4149 sequence
tttcatgataagttcgctgttgaattcaaatcaggagtcgagattgatgtagaagggtaatctttagaaagagaacagaagaattatattggatttttaaagataatatgatataataaaacgacttggaggtggaagaatgtataacttttcttgctaattatatgatgcataataagatatttaaagaaacggctatagaaccgtttgttttgttatgcaaattgcaagaaagttaagtattctacactcaataatac

SEQ ID NO: 30149 - DNA, 260 bp, Unknown
  Description of Unknown: RightRegion for integrase B4150 sequence
aagattgagttcagccgcgaaaataaccacgaatttatactagatatcaacctacgctaactcgcgtgggttactctataaccaccatctctatcatccgtatgatataaaagagtcatcgtgatgatagagaactaaaatataaaggagaaatcatcatgagaatcgtgtggaaagatagtaatgccagaactaaatcaaacataactacagaatatagagggtgtaagttatacggtagcgatgaaggatggacgata

SEQ ID NO: 30150 - DNA, 260 bp, Unknown
  Description of Unknown: RightRegion for integrase B4151 sequence
gctcgcgctgtgattcaggagtgtacttgggacggggagcggctttttattacgctctaaacctcactatttcataatggtggggttccgcccgcaatataaaaaagtgaatgtaaaataaaggaggtgattcagcgtggcttgtaaaattaaaacgctcctgcagtgcaagcactgcaggcatgatcttgagtttgcgacagtgtgcggtaatcgtcgtgtgccgcttctctggtgtccggactgcgatattttgtatc

SEQ ID NO: 30151 - DNA, 109 bp, Unknown
  Description of Unknown: RightRegion for integrase B4152 sequence
gtgaaagacgtaataaaaaaatgtgtatgggacggggagtccctttctattatgctttaaggctcacttttttatcatgcgtctttccggtctcattcgaagggctgac

SEQ ID NO: 30152 - DNA, 260 bp, Unknown
  Description of Unknown: RightRegion for integrase B4153 sequence
ggaagaggcaacgaaattaagtttgaacttgatattttccccaaaattcaagaaaaatgattaatgacatcttatatgtgccagttcttcggctcatagatgttatcagtaaataaaaaaagaaactcccggggaattaaccccgggatatttttatacttttttgatatcttttgcagccacaaatccgtagtacttgcctacaacgcggacataataccatgaagcaccgtttgttgctttctgggtgaaattcatca

SEQ ID NO: 30153 - DNA, 260 bp, Unknown
  Description of Unknown: RightRegion for integrase B4154 sequence
cgaatggggaacgaagccacctttgtcttggatattttccccagaattcagccaaattaattaatgataacatctatgtacaaacgaactcagtcatctggaaatggtatccactattgtacatcagcttacccgggacctttccatggaggaaattgagaaatccggatttggaccgtattatatcgatcacacagtgggagtctggccacaggcagcaggtggcgtaccatttaatgcatgtgaatttcagagtaaag

SEQ ID NO: 30154 - DNA, 260 bp, Unknown
  Description of Unknown: RightRegion for integrase B4155 sequence
gcggacgggcagatagttgttatcgtcaagggcggggttgagattggtgtgggaggataatttctccatttatttatatgcatttggataaatgtgcaaaaaaatgtacatcacctatgctatactctttgtgtaagcaagacgagagggagatagtacgatgtatggtgcgaacaagaaaatgctcaatctgctgattttgagggtgctgcaggagcactcggatgcagatcatcggctgacgccgagcgggatcattc

SEQ ID NO: 30155 - DNA, 260 bp, Unknown
  Description of Unknown: RightRegion for integrase B4156 sequence
ttcgttttgactcctgattgctccaccatacagttcgtactcgaacccgattctttatgaaaaagggttcgggtacgttttttgtttatcggaggttttgcggaaagagtacgcagagcggtaaacgaacaaaggcaggatatcactataagggtggtatcctgccttttgcttgtttgggaatttcgccttgttagaaaatttctggtctatgttgaaaaacctttctttttatgatataatcaatatgggtaaatata

SEQ ID NO: 30156 - DNA, 260 bp, Unknown
  Description of Unknown: RightRegion for integrase B4157 sequence
gtagggcgttttttattgcaatctttcaaagaaggttcaatctggtgcaccatcgggtgacgagaacagctcgggcccgccgccggtccggcgggcaaaaacgccccagtggggcgtttttagagcgcgggagagtccccgatggtgcaccagaaaaagccgcaacgaatgttgcggcttttttgttgcaccattcccttcgggacggactcgcacttcgcgcaagcgctcgtgttcgtctcgcggggactggtcgctaa

SEQ ID NO: 30157 - DNA, 260 bp, Unknown
  Description of Unknown: RightRegion for integrase B4158 sequence
gctcgcgctgtgattcaggagtgtacttgggacggggagcggctttttattacgctctaaacctcactatttcataatggtggggttccggtcgcattcgcagagatgctttgatcaggtcacgaattgtaatttcatttgcatccttcgagtttgcctttttcgtctccatgcgcaccaggtttggaatatttttgatctgaagttcagcggaatcctctatggtgattacacgttcccacggctgtatgtaattcgac

SEQ ID NO: 30158 - DNA, 109 bp, Unknown; identical to SEQ ID NO: 30030
  Description of Unknown: RightRegion for integrase B4159 sequence

SEQ ID NO: 30159 - DNA, 260 bp, Unknown
  Description of Unknown: RightRegion for integrase B4160 sequence
ggacatgggaatgaggccaattttgagctagacattttcccgaaaatccaagaaaaataattaatgatatcttctatgtactgacgaactggctcattgatgttgtcattaattaaaaaaagaaattcccggggaattaaccccgggatatttttatacttttttgatatattttgcggaaacaaatccgaaatattttccggctatgcggatgtaataccaagatgcgccgtctttggatttctgagtgaagttcataa

SEQ ID NO: 30160 - DNA, 139 bp, Unknown
  Description of Unknown: RightRegion for integrase B4161 sequence
cgcaaggggaatgaagccacctttgttttggatattttccccagaattcaatcaaattaattaatgataacatctatgtacaaacgaactcagtcatctggaaatggtatccactattgtacatcagcttacccgggac

SEQ ID NO: 30161 - DNA, 260 bp, Unknown
  Description of Unknown: RightRegion for integrase B4162 sequence
gctcgcgctgtgattcaggagtgtacttgggacggggagcggctttttattacgctctaaacctcactatttcataatggtggggttccgcccgctttataaaaaagtgaatataaaataaaggaggtctttttatgattttgtgttttgaattatcaatgccgtatgcggcaagctggaacggcaaatggtccggagcggatcagggacgctacattttcaaaacgtcccaggctgcttctatggtgaagctgttctct

SEQ ID NO: 30162 - DNA, 260 bp, Unknown
  Description of Unknown: RightRegion for integrase B4163 sequence
gctcgcgctgtaattcaggagtgtacttgggacggagagcggctttttattacgctctaaacctcactattttataatggtggggttccggtctcatacgaagtgctgacttaatcaaatctctgatggttacagccccttctccttctgcattcggtccgcgtgcttctaagcgcaccagattctgaactccttgaatctgtaactctgcattatcctcgatcgtgatcaggcgttctccttttggtatatagttcgac

SEQ ID NO: 30163 - DNA, 109 bp, Unknown
  Description of Unknown: RightRegion for integrase B4164 sequence
gctcgcgctgtgattcaggagtgtacttgggacggggagcggctttttattaagctctaaacctcactatttcataatggtggggttccggccgcatccgcagagacga

SEQ ID NO: 30164 - DNA, 260 bp, Unknown
  Description of Unknown: RightRegion for integrase B4165 sequence
gggaagggcaacgagattggttttcagctagacattttcccgaaaatccaagaaaaataattaatgatatcttctatgtgctggcgaactagcccattgatgttatcagtaattaaataaaagaaattcccgggggaattaaccccgggataatttttactgctttttgatatattttgcagatacaaagccataatactttccagaaatacggacataataccacttactaccgtttttatctttctgggtaaaattca

SEQ ID NO: 30165 - DNA, 109 bp, Unknown; identical to SEQ ID NO: 30063
  Description of Unknown: RightRegion for integrase B4166 sequence

SEQ ID NO: 30166 - DNA, 260 bp, Unknown
  Description of Unknown: RightRegion for integrase B4167 sequence
ggcaaaggtaacgagattaattttgagctagacattttcccaaaaattcaagaaaaatgattaatgacatcttctatgtgccagttcgccagcacattcatgttatcattaattttaaaaagaaactcccggggaagtaaccccgggatatttttatactctctgaatatctttcacagccacaaatccgtagtacttgcctgcaatgcggacatagtaccatgaagcaccgtttactgctttctgagtgaaattcatca

SEQ ID NO: 30167 - DNA, 260 bp, Unknown
  Description of Unknown: RightRegion for integrase B4168 sequence
cgtatgagccacttagagtgcgatggaagggactcgaacccccggcctactgattcgtagagggcctttatatgagtttcggcgttttgggtcattgcagcttatgtagattcatcgtcatttttgtgtttgttcgtgcatggtcgtttcacttcttttcgattcgataaggcaaaaacaaggcactttccagagggcatataatcacataaaacggacaccgtgaagaaggcaaaaaagttgacggctcacgagggcgg

SEQ ID NO: 30168 - DNA, 141 bp, Unknown
  Description of Unknown: RightRegion for integrase B4169 sequence
gctcgcgctgtaattcaggagtgtacttgggacggggagcggctttttattacgctctaaacctcactatttcataatggtggggtttcggacgcatacgcaaagctgcgcggatcagatcgcggatcgtaatttctgttc

SEQ ID NO: 30169 - DNA, 260 bp, Unknown
  Description of Unknown: RightRegion for integrase B4170 sequence
gctcgcgctgtgattcaggagtgtacttggaacggggagcggcttcttattacgctctaaacctcactatttcataatggtggggttcggattgttccgtaaattcacaaaatctctgtgaaattacttttcatttctcagataatatacaaaggaatagatcatcggaataaatgtgaccgcaagtatgagcaccagacttatcggaaatgccgggatccacggctgaatggccagcagaagaatcaacacgccgcctg

SEQ ID NO: 30170 - DNA, 109 bp, Unknown
  Description of Unknown: RightRegion for integrase B4171 sequence
gctcgcgctgtgattcaggagtgtacttgggacggggagcggctttttattacgctctaaacctcactatttcataatggtggggttctggccgtgaacgtaatgccgc

SEQ ID NO: 30171 - DNA, 260 bp, Unknown
  Description of Unknown: RightRegion for integrase B4172 sequence
gcagcgcgttttttattgcaatctttcaaagaaggttcaatctggtgcaccatcgggtgacgagaacagctcgggcccgccgccggtccggcgggcaaaaacgccccagtggggcgtttttagagcgcgggagagtccccgatggtgcaccaagaaaagccgcaacgaatgttgcggcttttttgtcgcaccattccctccgggacggactcgcacttcgcgcaagcgctcgtgttcgtctcgcggtgactggtcgctaa

SEQ ID NO: 30172 - DNA, 260 bp, Unknown
  Description of Unknown: RightRegion for integrase B4173 sequence
tataaaggcgtgtctgtcgatgattttaatcttacagtgttcccgaaaatgcctttgtagtcataaatgttatagtgcgtgtatagatgaaatcttcggcggctatccgtggtatcacaacgaggaaattctctacaaaccgggcttcccgtgggcttgctcgaccgcatcccgtgcggatctgctctgcgacgggctactgggtgacatcgacccgaatgattatgtcaacttctgctgtaacgaaacgctgaagaaca

SEQ ID NO: 30173 - DNA, 109 bp, Unknown
  Description of Unknown: RightRegion for integrase B4174 sequence
gctcgcgctgtaattcaggagtgtacttgggacggggagcggctttttattacgctctaaacctcactattttataatggtggggttgggacgcatacgcaaggatgcc

SEQ ID NO: 30174 - DNA, 260 bp, Unknown
  Description of Unknown: RightRegion for integrase B4175 sequence
gctcgcgctgtgattcaggagtgtacttgggacggggagcggctttttattacgctctaaacctcactattttataatggtggggctccggccgcatacgcagagccgtgcggatcagatcccggatactaatttcctgtgcaccctgtccatttgccggacgcgtctcaagccgcaccagattttttatattgttcaactgaagttctgcagaatcttctatggtaatgacacgctccccctctggtatatattccgaa

SEQ ID NO: 30175 - DNA, 109 bp, Unknown
  Description of Unknown: RightRegion for integrase B4176 sequence
gctcgcgctgtgattcaggagtgtacttgggacggggagcggctttttattacgctctaaacctcactatttcataatggtggggttccggccgcatacgaagggccgc

SEQ ID NO: 30176 - DNA, 260 bp, Unknown
  Description of Unknown: RightRegion for integrase B4177 sequence
atgagagatatcttaaaagaatgtgtatgggatggatcagaactttccattgtactttaatactcacttttttattatgtttccgttccaaacgcataataaaaaagtgagtataaacaaaaatagaagcagataccattcattggtagtcgcttccatactgcaataatttagatatggcttcctatgcgaatatcatttccaaattcccttgacatccgcaagaatcagtattatacttcaagtaccttgtcaatgca

SEQ ID NO: 30177 - DNA, 260 bp, Unknown
  Description of Unknown: RightRegion for integrase B4178 sequence
aaagcggggatcgggcgatacatagagaatgttttttctctggaaatccaatataaatagccatatccaacgtatctgtacctatgaattggcccatctcgaaatgattgccgccatcgtccgccagctcaccaaaggcttaagtgctgaagaacttgaggccgccggtttcgctccttactatgtcgatcacacggccgggatctggccgcaggcagccggcggtattccgtttaatgcctgtgaattccagagcaaag

SEQ ID NO: 30178 - DNA, 87 bp, Unknown; identical to SEQ ID NO: 30057
  Description of Unknown: RightRegion for integrase B4179 sequence

SEQ ID NO: 30179 - DNA, 260 bp, Unknown
  Description of Unknown: RightRegion for integrase B4180 sequence
atctctttgatatggaatttctgccccagctcatcgatgaagttttcgataaaaccatagtggacaacattgccctccgtagttttcagatagccctgccgctcccacacatcgtaaggaacatgatcacgccttacacggagaggcaatgtttcctcaggcaaccagaagtaaggcataacgtagtaatgttcatcttcttccgttggcggaaacaccaaaacaaatgctgtaatatccgttgtgctggaaaggtcaag

SEQ ID NO: 30180 - DNA, 260 bp, Unknown
  Description of Unknown: RightRegion for integrase B4181 sequence
gatgacgaggcgtcatgtgttcgtcttagctccactttgagccaccaaaatccgcactgaaaagtgcggatttttgctttatccgaactttttgaagaagaaccgaggctgccgacgcggcgtgtttttgcacaggcaggcttgatttttcttcgtttcacgcggctgtcgtccgcaccgtaaggtcaaggcaacttgggctgatgtcctccactcagcgacattgacgccaaccctgacgccaacggcgatgggacgaa

SEQ ID NO: 30181 - DNA, 109 bp, Unknown; identical to SEQ ID NO: 30025
  Description of Unknown: RightRegion for integrase B4182 sequence

SEQ ID NO: 30182 - DNA, 109 bp, Unknown
  Description of Unknown: RightRegion for integrase B4183 sequence
ccgggaataggaagatatatagagaattctttcagattggagattttcttaaagctgtgaacccgctgtttatgggcatttaatatcatatccaatggttaggagctaa

SEQ ID NO: 30183 - DNA, 260 bp, Unknown
  Description of Unknown: RightRegion for integrase B4184 sequence
gctcgcgctgtgattcaggagtgtacttgggacggggagcggctttttattacgctctaaacctcactatttcataatggtggggttctggtctcattctaagactagactttattagttgtcttattgtaatttcattttttccttctacattggcatttctagcttctaatcttactagattttttacattcttaatttgcaactccgcagagtcctcaattgttattactctttcgtcatttggtataaagttggat

SEQ ID NO: 30184 - DNA, 109 bp, Unknown
  Description of Unknown: RightRegion for integrase B4185 sequence
gtcagtggtgacggttgcaaaggttcagcttttgcgccgtcaagcgcagttgatttatgaaagagcatcgaagacttaaagttttcgatgcttttttgctcttgcacat

SEQ ID NO: 30185 - DNA, 260 bp, Unknown; identical to SEQ ID NO: 30048
  Description of Unknown: RightRegion for integrase B4186 sequence

SEQ ID NO: 30186 - DNA, 260 bp, Unknown
  Description of Unknown: RightRegion for integrase B4187 sequence
gctcgcgctgtgattcaggagtgtgcttgggacggggagcggatttttattacgctctaaacctcactatttcataatggtggggttccggtctcatacgaagagccgtcctgataagatctcttattgtaattggagtaaccccatcggtatttgcatttctggtctcaagccttactatatttttagctcccagaagctgcagctccgctgagtcttcaattgtaataattctctcatcatcaggaatatattgtgac

SEQ ID NO: 30187 - DNA, 260 bp, Unknown; identical to SEQ ID NO: 30073
  Description of Unknown: RightRegion for integrase B4188 sequence

SEQ ID NO: 30188 - DNA, 260 bp, Unknown
  Description of Unknown: RightRegion for integrase B4189 sequence
ttcgttttgactcctgattgctccaccattggctcaaataagagttacaaacaccgttgatttcaaatcgaagtcaacggtgtttttgtgtttgtcagcaagcaagttcatcgctattctccaaatactgtgcaagatcaaagttgaagtccacatggatttggtatccgcgataaacttctaccctgcggataagctggctgacgatcatcttttttgcttcaaagctggcactatcgtacaggtctgcgtaagagatc

SEQ ID NO: 30189 - DNA, 260 bp, Unknown
  Description of Unknown: RightRegion for integrase B4190 sequence
gatagaatatctctaaagaatatagtgagacaagtccccactcctacaagcaaggtttaagaaatttcaatacataaatctaaaataaacatctatattttgagcaatgcttatatctttgcatttactcacaaaaaataggtgtttttttgagtttaggcacttaaatacactttaactaataaatatttaagttttttgcaaaaaaaagaagccgcccagctcaacagctgaacagctatagccccgctaatgcgggg

SEQ ID NO: 30190 - DNA, 260 bp, Unknown
  Description of Unknown: RightRegion for integrase B4191 sequence
gggaaaggcaacgagattggtttccagctagacattttcccaaaaattcaagaaaaatgattaatgatatcttctatgagctgacgaactggctcattgatgttatcagtaattataaaaagaaagtcccggggaattaaccccgggatattttttactgtttcttaatatattttgcagatacaaagccataatattttccagcaatgcgaatgtaataccacttactaccgtttttatctttctgggtaaaattcatt

SEQ ID NO: 30191 - DNA, 260 bp, Unknown
  Description of Unknown: RightRegion for integrase B4192 sequence
gctcgcgctgtaattcaggagtgtacttgggacggggagcggctttttattacgctctaagcctcactatttcataatggtggggctccaatacccgtcttgcagaatttaaatgttcacactctctgatgatcattcccttattactcatcgttttcccccttacgcactcactgttttatctctctgtaaagcggcattcggaatataaacggtttttcacctgccagcgccactacagcatcaccattccttagtct

SEQ ID NO: 30192 - DNA, 260 bp, Unknown
  Description of Unknown: RightRegion for integrase B4193 sequence
tataaaggcgtgtctgtcgatgattttaatcttacagtgttcccgaaaatgcctttgtagtcatgaatgttatagtgcgtgtatagatgagatcttcggcggctatccgtggtatcacaacgaggaaattctctacaaaccgggcttcccgtgggcttgctcgaccgcatcccgtgcggatctgctctgcgacgggatactgggtgacatcgacccgaatgattatgtcaacttctgctgtaacgaaacgctgaagaaca

SEQ ID NO: 30193 - DNA, 109 bp, Unknown; identical to SEQ ID NO: 30067
  Description of Unknown: RightRegion for integrase B4194 sequence

SEQ ID NO: 30194 - DNA, 260 bp, Unknown
  Description of Unknown: RightRegion for integrase B4195 sequence
gctcgcgctgtgattcaggagtgtacttgggacggggagcggctttttattacgctctaaacctcactatttcataatggtggggttccggccgcatccgcagagacgaacggatcagttcccggattccgatttctctgcatccttcggtattgccgttacgagtctctaaacgaaccagattcggaagaccctgcagctgtagttccgcactgtcttctatggtgatcacccgctcttccgccgaaatatagccggac

SEQ ID NO: 30195 - DNA, 260 bp, Unknown
  Description of Unknown: RightRegion for integrase B4196 sequence
gtgaaggacgttataaaaaaatgcgtatgggacggggagtccctttctattatgctttgatgctcacttttttatcttgcgtccttcaccccgcattgcaaaaaagtgaaatactaaaaaatggaaggaggcgttgtttatgccggctatctatcatgtgttcggatccggagatttctttctggaaaccatcagccagcgcgaggctgcactggccgctcaggacgtcgcaaacgaaaccggacagcctgcgtcggtga

SEQ ID NO: 30196 - DNA, 260 bp, Unknown
  Description of Unknown: RightRegion for integrase B4197 sequence
ttagttaagagaattgtatttcaaaaagatggacaaatcgatatcgaatatacaatctagccagtaaaatatacacttcttttgcgtacatctgttgatacattagtacataaaagaagtgtattatttacggcattttcctagaataattggaatcgatctataggctttccaaatgctccagcatagccatcttgaccgtttggaaaatagaaagaattttcacattctcttctaacatggataatatgtctcaacat

SEQ ID NO: 30197 - DNA, 140 bp, Unknown
  Description of Unknown: RightRegion for integrase B4198 sequence
gctcgcgctgtaattcaggagtgtacttgggacggggagcggctttttattacgctctaaacctcactatttcataatggtggggttccggtctcatacgaagagccgtcctgataagatctcttattgtaattggagta

SEQ ID NO: 30198 - DNA, 260 bp, Unknown
  Description of Unknown: RightRegion for integrase B4199 sequence
tacgatgagaaagttatcgtggaattcaaatccggcacaaatgtggatatccacaggtaaatacagttcagattattggcacctcgcttcggcggggtgttttttgttacaaaaaattcattgttgattcatctgctaatattgtaatttgttgggttctgtagtataataaattatccgatttgtgttagaactaacaagaattacgagcaggagcagcaaatatatgataaagaacaatattgaagtagatgtaaaag

SEQ ID NO: 30199 - DNA, 260 bp, Unknown
  Description of Unknown: RightRegion for integrase B4200 sequence
aaagcggggatcgggcgatacatagagaatgttttttccctggaaatccaatataaatagccatatccaacgtatctgtacctatgaattagcccacctcgaaatgattgccgccatcgtccgccagctcaccaaaggcttaagtgctgaagaacttgaggccgccggtttcgctccttactatgtcgatcacacggccgggatctggccgcaggcagccggcggtattccgtttaatgcctgtgaattccagagcaaag

SEQ ID NO: 30200 - DNA, 109 bp, Unknown
  Description of Unknown: RightRegion for integrase B4201 sequence
gctcgcgctgtaattcaggagtgtacttgggacggggagcggctttttattacgctctaaacctcactatttcataatggtggggttccggccgcatccgcagagacga

SEQ ID NO: 30201 - DNA, 260 bp, Unknown
  Description of Unknown: RightRegion for integrase B4202 sequence
gccggtgcaggtcggtggatagacaatgtattttctcttgatatttttctaaatctttaatttccaacatcaatgtgcatatgagctggcgcattgatgttggatattattataccaatttcttaaaagacagattaccgttatctcttggaaggaaggcgaactgtccaagccttagagagttagtgtattcaccatctgtgacatacagcttgttattgctaaaatatgccacttctgcattactctgaagaaatgat

SEQ ID NO: 30202 - DNA, 109 bp, Unknown; identical to SEQ ID NO: 30059
  Description of Unknown: RightRegion for integrase B4203 sequence

SEQ ID NO: 30203 - DNA, 260 bp, Unknown
  Description of Unknown: RightRegion for integrase B4204 sequence
gctcgcgctgtaattcaggagtgtacttgggacggggagcggctttttattacgctctaaacctcactatttcataatggtggggttcaggacgcattcgaagagatgatttaattaagtctcttattgtaacctgcccggcacctgaagcatttgcatttctagtctccagactaaccagattatcaattcctgtaatctgaagctctgctgaatcctcaattgtaataattctttcatccttaggaataaaattggaa

SEQ ID NO: 30204 - DNA, 260 bp, Unknown; identical to SEQ ID NO: 30101
  Description of Unknown: RightRegion for integrase B4205 sequence

SEQ ID NO: 30205 - DNA, 109 bp, Unknown
  Description of Unknown: RightRegion for integrase B4206 sequence
aaagcggggattgggcgatacatagagaatgttttttccctggaaatccaatataaatagccatatccaacgtatctgtacctatgaattagcccaccttgaaatgatt

SEQ ID NO: 30206 - DNA, 260 bp, Unknown; identical to SEQ ID NO: 30073
  Description of Unknown: RightRegion for integrase B4207 sequence

SEQ ID NO: 30207 - DNA, 260 bp, Unknown
  Description of Unknown: RightRegion for integrase B4208 sequence
acttgcatcgttagggtatcgaaaaactggtttgttgtcgttggcacgtgtcaaaaatagcaatttccggtgtttgcaaaacaccagatgggcggcttgctgtaagcccgtctaacgccagaaagcggggcaccccttgtcagggtaccccgcttgaacactaataagaaagcttctggccggggtagatcgtataaggtgccccaatgccgttcttgcttgcgatggtgtgccagtcgataccgagcgaagcgccaatc

SEQ ID NO: 30208 - DNA, 109 bp, Unknown
  Description of Unknown: RightRegion for integrase B4209 sequence
gctcgcgctgtaattcaggaatgtacttgggacggggagcggctttttattacgctctaaacgtcactatttcataatggtggggctctggtctcatacgaagagccgt

SEQ ID NO: 30209 - DNA, 260 bp, Unknown
  Description of Unknown: RightRegion for integrase B4210 sequence
ttcgttttgactcctgattgctccaccatacagttcgtactcgaacccgattctctatgagaaagggttcgggtacgttttttgtttacaggaagttctgcggagggagtacgtagaacggtaagcaggagcaagtaaaggcagggtatcaccatggcggtggtgccctgcctttttgctttgtatttccctatattgcgcttttcggactaatcgctgcgtacatccgtacatggtcggtacgcacgtacgcaggaaaa

SEQ ID NO: 30210 - DNA, 260 bp, Unknown; identical to SEQ ID NO: 29017
  Description of Unknown: RightRegion for integrase B4211 sequence

SEQ ID NO: 30211 - DNA, 260 bp, Unknown; identical to SEQ ID NO: 29806
  Description of Unknown: RightRegion for integrase B4212 sequence

SEQ ID NO: 30212 - DNA, 260 bp, Unknown
  Description of Unknown: RightRegion for integrase B4213 sequence
cagaaattggagcgctctggccaaaagatagccaatcggaaccactcggcacaaaaataaaccccggggctcacgccccggggttccatcttagttggcccatccttaggccgccttcatcttactacgggagggcgccctcgatgacgacgtgagtgctcggcggcacgcggtcgcagacctccaccaccacgcggcgcatggggagcgtgcgggtcggctgggcggacgccacgagcgcggagagcgcggcggcctcg

SEQ ID NO: 30213 - DNA, 260 bp, Unknown
  Description of Unknown: RightRegion for integrase B4214 sequence
acttgcatagttagagtatcgaaaaactggtttgttgtcgttggcacgtgccaaaaatagcaatttccggtgtttgcaaaacaccagatgggcggcttgctgtaagcccgtctaacgccagaaagcggggcacccattgtcagggtaccccgcttgaacactaataagaaagcttctggccggggtagatcgtataaggtgccccaatgccgttcttgcttgcgatggtgtgccagtcgataccgagcgaagcgccaatc

SEQ ID NO: 30214 - DNA, 260 bp, Unknown
  Description of Unknown: RightRegion for integrase B4215 sequence
tctttttgtgcgaccgggaggattcgaacagcaacgacgacgaccgcagccagcggctgaaacagggaggagttgttggggccgcgttctgatttttcaaagccctgccaaggggctgcagaaaaatcagcaaacgcaacccgtaaggccctgaccaccagattccgctgcggtgcccaacctgtaggaatgtctaccgggaggctgctgcttattttgcttcacccaataattcccctttcgtagtaacaacggataac

SEQ ID NO: 30215 - DNA, 260 bp, Unknown
  Description of Unknown: RightRegion for integrase B4216 sequence
ttcgacgatcacttcatagtcgtcttcaagtcaggcctggagacacaaatcgacttatagcatgatgaaaaggcgcatccttcgagggtgcgcctttttttattgcaatggaatgttttcctctatataatacattatataaggaccaaataacaggagtgtagagacgatacgttcgatgggactttcattaagaaaacggcgagtctgctgataattacagcgaaatttgccgaagagtagcattggcttgagccatg

SEQ ID NO: 30216 - DNA, 260 bp, Unknown
  Description of Unknown: RightRegion for integrase B4217 sequence
tactttcttaaaggcgatgagattacttttttattggatatattcccgaaaattcaatgaaaattaactactgataacatctatgtgccagttcctctgtgccgatatcattcagcactgccgcagccatgcggtttggcatggtaaacctctgagacaggtacctcatagatgccccaatctcaccatccgggccaccgtactggctgaggatatactgtgcaatctttgcattcggtttggtaatatttaccggatac

SEQ ID NO: 30217 - DNA, 260 bp, Unknown
  Description of Unknown: RightRegion for integrase B4218 sequence
ggaacggtcgatacccctactttcgaacttacattaaagcctcgaatccctcggatttaggggcttttcttttactgataacatttttgtcccaacgaactggctcaccttgaaatcatctgtgccattgtgcatcagcttacccgtaatcttacaccagaacaaattgaaaaatccggcttcgacaaatattatgtagaccacacactcgcactctggcctcaggctgccagcggaactccttggagtgctacaacatt

SEQ ID NO: 30218 - DNA, 140 bp, Unknown
  Description of Unknown: RightRegion for integrase B4219 sequence
aaaaatggtgatgacatctcttttactttagatatttatccgaaaatccagcaaaagtaagtgtaggtagcctttatgtacctacacattggcacgtatcgtgtcctccggccaagttgcgtagatctcactgctggcca

SEQ ID NO: 30219 - DNA, 260 bp, Unknown
  Description of Unknown: RightRegion for integrase B4220 sequence
ggaatggcagatattcctacatttgagcttgtgctgaagcctcgaatcccccggatttaggggcttttctcttactgataacatttttgtaccggcgaactggctcaccttgaaatcatctgtgccattgtgcatcagcttacccgtaatcttacaccagaacaaattgaaaaatccggcttcgacaaatattatgtagaccacacactcgcactctggcctcaggctgccagcggaactccttggagtgctacaacatt

SEQ ID NO: 30220 - DNA, 109 bp, Unknown
  Description of Unknown: RightRegion for integrase B4221 sequence
aaaaatggcgatgacatctcttttactttagatatttatccgaaaatccagcaaaagtaagtgtaggtagcctttatgtacctacacattggcacgtatcgtgtcctcc

SEQ ID NO: 30221 - DNA, 260 bp, Unknown
  Description of Unknown: RightRegion for integrase B4222 sequence
gtatcaagggataagaaactaacatttaagtttagaaacggcaaggaaatagaagtataagaaattagataagtattgaccttcatcagaaatggtgggggttttttgcaaatgcaaagaaatgcaacttgcattaattgacaaatgcaataagtttttttataattatgttatcttgataatcgaggtaaataattatggagtatgaaaaaataatattagaacttatggaaagagtcgcaaaactcgaagaaagggta

SEQ ID NO: 30222 - DNA, 260 bp, Unknown
  Description of Unknown: RightRegion for integrase B4223 sequence
cgcctcataaacgggctggaactgacaggctcggagggaaacagcgatggcgagaaatagatgtctgccctttggatacaggttggaaaacggagaaatcgtgatatgcgcttccgaagccgagtgcgtaaagaacgcatatgcttcctatgctgatggcatctcctacgcctccatcgcagtaactctgcaggccacaggcatccgctatcacccagatacgccgctttggaataagcacatggttaaacgcatgctgg

SEQ ID NO: 30223 - DNA, 260 bp, Unknown
  Description of Unknown: RightRegion for integrase B4224 sequence
cacatcgatttcagccgcgagaacaacgccgagtttatattagacgtctatctcaagtgagatgggcgcatggtcggagccgagtatgtcagtgtgaatttcggctgatctgatgcactctcgcgcgaaatcggacacgaggaagtagtccagacgccaaccgatattccgagcccttgcacccgctcgatagctccaccagctatactttgcttcatcagggtgcaggtcgcggaacgtgtcggtataccctgcctcca

SEQ ID NO: 30224 - DNA, 109 bp, Unknown
  Description of Unknown: RightRegion for integrase B4225 sequence
gctgtcagtggtgacggttgcaaaggttcagcttttgcgccgtcaagcgcatataactaagatacagaagcctttgatatacaagggtttctgtatttttttattttca

SEQ ID NO: 30225 - DNA, 260 bp, Unknown
  Description of Unknown: RightRegion for integrase B4226 sequence
attgaatttagtagagaaagtgatttagaatttatattagacatagacttacatcaataaatcatagacccaccatagtgtgggctatcttttaccccgcgtatatatcatcatggtgcagtttttataacaccctaatgatatataccttgtggcaacagtgtagaaaccttgatatatcaacatttaggaggaattgtaaaatgagaatagtatggaaagacagtgttaacaacgaatataaaccgtcaagatataga

SEQ ID NO: 30226 - DNA, 260 bp, Unknown
  Description of Unknown: RightRegion for integrase B4227 sequence
gaggggttcggccttggtgcatcaagctccaccaaacagttcaaaatccgaaccctttaaccggggttcggatttttcgttcttatcttcaaccaaggctatcggacggaaatagatgcaaaatcgcatttcatttcagaccgattttcgtagatttaaatttttatatgacacgcaaataaacagaaatctgtctctgggtttattgcttatagattaatttcccaacgattttgggtaatgtaaagtcgagtggcgga

SEQ ID NO: 30227 - DNA, 260 bp, Unknown; identical to SEQ ID NO: 30212
  Description of Unknown: RightRegion for integrase B4228 sequence

SEQ ID NO: 30228 - DNA, 260 bp, Unknown
  Description of Unknown: RightRegion for integrase B4229 sequence
attgaattcagtcgtgaaaatgatatagaattcatattagacatagacctacaccaataaagtgtgggttagcttttacccttcgtgtatatcattatggtgttatttttatagcgccccaatgatatacacgttggcaaaacaacgtttggaggaaatataaatgagaatagtatggaaagatacagcagtagaaagagcagacttcaaataccgtggatattggattgagggttataagaatggttggaccgtaacga

SEQ ID NO: 30229 - DNA, 109 bp, Unknown
  Description of Unknown: RightRegion for integrase B4230 sequence
aaaaatggtgatgatgtttcttttactttagatatttacccaaaaatacagcaaaaataagtgtgggtagcctttatgtgcccacacatttgcgcgtattgtatcatcc

SEQ ID NO: 30230 - DNA, 260 bp, Unknown
  Description of Unknown: RightRegion for integrase B4231 sequence
agactgaggttttacccgtattattttgaagaaacttttatttttacacaagcaagctaataaaaaatagataggcaaaagcctatctattttttatttatcttctcttttcatctgagcaagccagatatcaaatacctttccttccggagcatcaggatcatgcatataagcctttgccatttttacataggtacttgcttcactgcccagaacatcagagaaatcactgtaaagcatattcatagtataataaaagt

SEQ ID NO: 30231 - DNA, 260 bp, Unknown
  Description of Unknown: RightRegion for integrase B4232 sequence
aaaaacggtgatgatgtttcttttactttagatatttatccgaaaatccagcacaaataagtgtgggtagcctttatgcgcccacacattggcacgtatcgtgtcctccggccaagttgcgtagatctcactgctggccacgtttttgatataatccttatatcttacataataatcctgtgcagaggtatcccctattggcccgtcgtggactacgatatactccgggatcaccactttgtttaatacgatctctccgg

SEQ ID NO: 30232 - DNA, 260 bp, Unknown
  Description of Unknown: RightRegion for integrase B4233 sequence
attttacttgtaagctgtagcgtgttcggttttgtacaaaagatagcggacagggtttgaaaccctgcccgctttttcttttttattttgaaaaagctattgacatttaaacgatttcgtattataataatatcgtagtcaaggggcgcgcacctccaacagaagggaggtgaggccaatgcgaaaaaagctgcttcaatacataatctgtatagctgttctattcctgcttgcggtgattttcgccgtcaaagtaaaat

SEQ ID NO: 30233 - DNA, 260 bp, Unknown
  Description of Unknown: RightRegion for integrase B4234 sequence
aaaaatggcgatgacatctcttttactttagatatttatccgaaaatccagcaaaagtaagtgtgggtagcctttatgtacctacacattggcacgtatcgtgtcctccggccaagttgcgtagatctcactgctggccacgtttttgatataatccttatatcttacataataatcctgtgcagaggtatcccctattggcccgtcgtggactacgatatactccgggatcaccactttgtttaatacgatctcgccgg

SEQ ID NO: 30234 - DNA, 260 bp, Unknown
  Description of Unknown: RightRegion for integrase B4235 sequence
ataaaagcacccgccgtaccccggcgggtgtttttgctttggtgctccgtgagctgctgaggagtcaaacagggcggcagtaccgcagtaccagcccgatggccgatgcggaacgcggatgccgtgcgttcgtcatcctcggtggaatcactctcattataccagtggtttgcccggtgtttgaatgccctgcgaatagccgcctgcccctcatacagggcaggcataaaaaaatacggtgtgcgtgcatcgtggtttca

SEQ ID NO: 30235 - DNA, 75 bp, Unknown
  Description of Unknown: RightRegion for integrase B4236 sequence
gttcgtatgagccacttagagtgcacctccagggactcgaaccctgggcccactgattaagagtcagttgctcta

SEQ ID NO: 30236 - DNA, 260 bp, Unknown
  Description of Unknown: RightRegion for integrase B4237 sequence
attgaattcagccgtgagaataacggtgagttcatactagatatagacctacaccaatgagtgtgggttcctctttgagccacgtttatatcattagggcgctatttttacaacaccctcatgatatataccttgtctgaactaagaagaaaccttgatatatcaacttttaggaggaattataaaatgagaatcgtatggaaagacactgctgttgctagagctgattttaaatatagagggtactgggttgaaggtta

SEQ ID NO: 30237 - DNA, 260 bp, Unknown
  Description of Unknown: RightRegion for integrase B4238 sequence
ataaaagcacccgccgtaccccggcgggtgtttttgttttggtgctccgtgagctgctgaggagtcgaacagggcagcagtaccgcagtaccagcccgatggccgatgcggaacgcggatgccgtgcgttcgtcatcctcggtggaatcactctcattataccagtggtttgcccggtgtttgaatgccctgcgaacagcccgcctgcccctcatacagggcaggcataaaaaaccacggtgcgtgtgcatcgtggtttc

SEQ ID NO: 30238 - DNA, 260 bp, Unknown
  Description of Unknown: RightRegion for integrase B4239 sequence
gtgtacagcaaagacgatatccgggtgaccttcaaggacgggacggaaatcagagcataagcaggaaaaaaggattacggcagagaatccaagaggaaacgcaggattctctgccgtatttttgatgaagaaaatcggaatatgatataatagtaagggtttcaggtgtgcgaagtttgagtgagatataaatgtttggcgaaatatttttgcgtgatggccctctctgcccatcggcaataccgatgctatcaagcccc

SEQ ID NO: 30239 - DNA, 260 bp, Unknown
  Description of Unknown: RightRegion for integrase B4240 sequence
ggaacggtcgatacccctacttttgaacttacattaaagcctcgaatcccccggatttaggggcttttcttttactgataacatttttgtaccaacgaactggctcaccttgaaatcatctgtgccattgtgcatcagcttacccgtaatcttacaccagaacaaattgaaaaatccggcttcgacaaatattatgtagaccacacactcgcactctggcctcaggctgccagcggaactccttggagtgctacaacatt

SEQ ID NO: 30240 - DNA, 260 bp, Unknown
  Description of Unknown: RightRegion for integrase B4241 sequence
ggaacggtcgatacccctacttttgaacttacattaaagcctcgaatcccccggatttaggggcttttcttttactgataccatttttgtaccaacgaatttgcccatatggaaatcgtatgcgccattgtacaccagctcacacgcaatctgactccggaacagcttgaaaaatccggttttgataaatattatgttgaccatacacttgctctttggccacaggctgccagtggaactccttggagtgctacaacttt

SEQ ID NO: 30241 - DNA, 260 bp, Unknown
  Description of Unknown: RightRegion for integrase B4242 sequence
atacaaactaaagacggaatcattaggggtgatatagaaattgaaatcatcctaaaataattatgtacccctgtaacatcatgatggttctcattcatgcgtgagagtttctacatcggaactggtttgattgaagttcgcaaagataaacggtgcaccatatacatcaaaagatgtgcaatatccaccggcagccttacccggcttactttccagatccattagtttatgatctaccataaattgaaagaattcgccgg

SEQ ID NO: 30242 - DNA, 74 bp, Unknown
  Description of Unknown: RightRegion for integrase B4243 sequence
gttcgtatgagccacttagagtgcacctccagggactcgaaccctgggcccactgattaagagtcagttgctct

SEQ ID NO: 30243 - DNA, 260 bp, Unknown
  Description of Unknown: RightRegion for integrase B4244 sequence
aaccaaatacttattattggtttggttctggttcagacaaggaagcatcttatggtttagtgccgtaaggtgcttttgcttttcatatcaacaaagagaatgccccgcgctgttacagtgcagggcattctctttgttggaataaatctccaactaggattgttagcatttcctagtatacccgactattccaatcattgcaaccacattccaaatttgcttcaaacttgcttcaaactttctgcttaccgctaccaagc

SEQ ID NO: 30244 - DNA, 260 bp, Unknown
  Description of Unknown: RightRegion for integrase B4245 sequence
aaaaatggtgatgatgtttcttttactttagatatttacccaaaaatacagcaaaaataagtgtgggtagcctttatgtgcccacacatttgcgcgtattgtatcatccggccaggtagcgtagatctcgctgctggccacatttttgatataatctttgtaacgtacataatagttctgcgcattagtatctcctaccggtccatcatggactacgatatactccgggatcaccacccggcttaaaacaatctctccgg

SEQ ID NO: 30245 - DNA, 260 bp, Unknown
  Description of Unknown: RightRegion for integrase B4246 sequence
acctgcattgtaagggtatcgaaaaactggtttgttgtcgttggaacgtgccagaaatagccatttccggtgtttgcaaaataccagatgggcggcttgctgtaagcccgtctaacgccagaaagcggggcaccccttgtcagggtgccccgcttgaacgctaataagaaagcttctggccggggtagatcgtataaggtgccccaatgccgttcttgcttgcgatggtgtgccagtcgatgccgagcgaagcgccaatc

SEQ ID NO: 30246 - DNA, 260 bp, Unknown
  Description of Unknown: RightRegion for integrase B4247 sequence
cacatcgatttcagccgcgagaacaacgccgagtttatattagacgtctatctcaagtgagatgggcgcatggtcggagccgagtatgtcagtgtgaatttcggctgatctgatgcactctcgcgcgaaatcggacacgaggaagtagtccagacgccagccgatattccgagcccttgcacccgctcgatagctccaccagctatacttcgcttcatcggggtgcaggtcgcggaacgtgtcggtataccctgcctcca

SEQ ID NO: 30247 - DNA, 260 bp, Unknown
  Description of Unknown: RightRegion for integrase B4248 sequence
ttcgcacaaggtcacgttgcctccaccaaacagttcgtactcgaacccgattctctatgagaaagggttcgggtacgttttttatttacaggaaatcctacggcgagagtacgcagaacggtaagcaaggacgagtaaaggcagggtatcaccatggcggtgtaccctgccttttactgtttacttggtataggggtggtctttcggttggcagtatggtatactcggctcagaaaatggtatcgccacactgaaataaa

SEQ ID NO: 30248 - DNA, 260 bp, Unknown
  Description of Unknown: RightRegion for integrase B4249 sequence
ataaaagcacccgccgtaccccggcgggtgcttttgttttggtgctccgtgagctgctgaggagtcgaacagggtggcagtaccgcagtaccagcccgatggccgatgcggaacgcggatgccgtgcgttcgtcatcctcggtggaatcaatctcattataccagtggtttgcccggtgtttgaatgccctgcgaacagcccgcctgcccctcatacagggcaggcataaaataccacggtgtgtgtgcatcgtgctttg

SEQ ID NO: 30249 - DNA, 109 bp, Unknown
  Description of Unknown: RightRegion for integrase B4250 sequence
gactttaagcgcggagatgaaatcactttcaccctggatatctaccccaaaatccaatagaaataccattgataacctctctgtaccgacgaactggcacacatggaaa

SEQ ID NO: 30250 - DNA, 260 bp, Unknown
  Description of Unknown: RightRegion for integrase B4251 sequence
gtacttcttttcgaaggtgcgttcggatttgttttttattttcccatcatgaaagtataaaatgtttattacagtgaggattagtgttgacaaaattggtaaaaatattataatggtatcatatgataccattgtatcggcggtgattatctgatgggttgcaatcacgttcagaagattctgagtgatatgagatatgcaattgataataagaagttttatccaataaataggcgtaaaaatttagatacattggctca

SEQ ID NO: 30251 - DNA, 260 bp, Unknown
  Description of Unknown: RightRegion for integrase B4252 sequence
ggaacggtcgatacccctacttttgaacttacattaaagcctcgaatcccccggatttaggggcttttcttttactgataccatttttgtaccaacgaactggctcaccttgaaatcatctgtgccattgtgcatcagcttacccgtaatcttacaccagaacaaattgaaaaatccggcttcgacaaatattatgtagaccacacactcgcactctggcctcaggctgccagcggaactccttggagtgctacaacatt

SEQ ID NO: 30252 - DNA, 260 bp, Unknown; identical to SEQ ID NO: 30239
  Description of Unknown: RightRegion for integrase B4253 sequence

SEQ ID NO: 30253 - DNA, 139 bp, Unknown
  Description of Unknown: RightRegion for integrase B4254 sequence
aaaaatggcgatgacatctcttttactttagatatttatccgaaaatccagcaaaagtaagtgtgggtagcctttatgtacctacaaatacggcatcatctcttcactctgtgtcggccatccgatatcattccagaac

SEQ ID NO: 30254 - DNA, 260 bp, Unknown; identical to SEQ ID NO: 30239
  Description of Unknown: RightRegion for integrase B4255 sequence

SEQ ID NO: 30255 - DNA, 260 bp, Unknown
  Description of Unknown: RightRegion for integrase B4256 sequence
ataaaagcacccgccgtaccccggcgggtgtttttgttttggtgctccgtgagctgctgaggagtcgaacagggcggcagtaccgcagtaccagcccgatggccgatgcggaacgcggatgccgtgcgttcgtcatcctcggtggatcactctcattataccagtggtttgcccggtgtttgaatgccctgcgaacagcccgcctgcccctcatacagggcaggcataaaaaaccacggtgcgtgtgcatcgtggtttca

SEQ ID NO: 30256 - DNA, 260 bp, Unknown
  Description of Unknown: RightRegion for integrase B4257 sequence
ttcgaacctatcaaaatgtatttgataggtcggttactgttctgtatgaaacaaatataattttaaaacaacggattttgtccgttgtttttttgttgcaaaatttttttaattttttttgaaaaaaggcttgacatttacgcccaatgggcgtataataaagacaagaaatgaggaaaacctcaaaataataaccaaaaacaataaattttaggaggacaaaacaatgaaaagatttcaagttgaaaattgtgtacaaa

SEQ ID NO: 30257 - DNA, 260 bp, Unknown
  Description of Unknown: RightRegion for integrase B4258 sequence
tgggatgaccgcatcaccgtcgaactgaaatccggcgtcagcattgatgtggatgcatgaccctataggtatgcaaaggctccccaccactggataatttccggtgatggggagcctttttttacagtgcaaagtttaaatgaaacaattcatttatagcgtttctaatattggcatcctctatcccataatgtttcatctgcatagcataaacaatatattctaagtatattaaatctaaaagagcaagtccaataaaa

SEQ ID NO: 30258 - DNA, 109 bp, Unknown
  Description of Unknown: RightRegion for integrase B4259 sequence
gctgtcagtggtgacggttgcaaaggttcagcttttgcgccgtcaagcgcattaaaataacaattaggtgtgataaagacggcggtatcgaaatataaagatgccgctg

SEQ ID NO: 30259 - DNA, 260 bp, Unknown
  Description of Unknown: RightRegion for integrase B4260 sequence
acgatagtcgttctgccttacggtttcgtacttgcgacccagattaaggataggctttgagcctgtcctttttcttttggtagtcggtagtccgttttaacgaattttccttatatatacatgtaatgcgagggagcgacgagattgtgctttgcgtccctttactttttggaaaaatcttttcaggttttacgaactaccagtactaccagatagccaaaagccttgcaaatcaaggactttcttcggtagcaggctca

SEQ ID NO: 30260 - DNA, 260 bp, Unknown
  Description of Unknown: RightRegion for integrase B4261 sequence
aggcttcgattttacccatattattttgaagaaacttttatttttacacaagcaagctaataaaaaatagataggcaaaagcctatctattttttatttatcttctcttttcatctgagcaagccagatatcaaatacctttccttccggagcatcaggatcatgcatataagcctttgccatttttacataggtacttgcttcactgcccagaacatcagagaaatcactgtaaagcatattcatagtataataaaagt

SEQ ID NO: 30261 - DNA, 260 bp, Unknown
  Description of Unknown: RightRegion for integrase B4262 sequence
cagaaattggagcgctctggccagaagatagccaatcggaaccactcggcacaaaaataaaccccggggctcacgccccggggttccatcttggttggcccatccttaggccgccttcatcttactacgggagggcgccctcgatgacgacgtgagtgctcggcggcacgcggtcgcagacctccaccgccacgcggcgcatggtgagcgtgcagggcggctgggcggacgccacgagcgcggccagggcggcggcctcc

SEQ ID NO: 30262 - DNA, 109 bp, Unknown
  Description of Unknown: RightRegion for integrase B4263 sequence
aaaaatggcgatgacatctcttttactttagatatttatccgaaaatccagcaaaagtaagtgtgggtagcctttatgcacccacacattggcacgtatcgtgtcctcc

SEQ ID NO: 30263 - DNA, 109 bp, Unknown
  Description of Unknown: RightRegion for integrase B4264 sequence
aaaaatggcgatgacatctcttttactttagatatttatccgaaaatccagcaaaagtaagtgtaggtagcctttatgtacctacacattagcccgtatcgtgtcctcc

SEQ ID NO: 30264 - DNA, 260 bp, Unknown
  Description of Unknown: RightRegion for integrase B4265 sequence
acttgcatcgttagagtatcgaaaaactggtttgttgtcgttggcacgtgtcaaaaatagcaatttctggtgtttgcaaaacaccagattggcggcttgctgtaagcccgtctaacgccagaaagcggggcaccccttgtcagggtaccccgcttgaacgctaataagaaagcttctggccggggtagatcgtataaggtgccccaatgccgttcttgcttgcgatggtgtgccagtcgatgccgagcgaagcgccaatc

SEQ ID NO: 30265 - DNA, 260 bp, Unknown
  Description of Unknown: RightRegion for integrase B4266 sequence
gagaataacgaggcaaagtgttcgtttaagctctgctctgctccaccaagaacgagttgatgaaagtcagctcgttctttttgttttgtagtggtttggaaaatgtaagcgatacgccagtggcgtatcagagccgctctgcggcctgcgtcgagatcacactttcgtcgttttaccacaaaagcaaaaatatcgagctgcccttaggctggctcgatattttctttctctctattttttgcgtgtccgtcctctttcgg

SEQ ID NO: 30266 - DNA, 260 bp, Unknown; identical to SEQ ID NO: 30239
  Description of Unknown: RightRegion for integrase B4267 sequence

SEQ ID NO: 30267 - DNA, 109 bp, Unknown
  Description of Unknown: RightRegion for integrase B4268 sequence
ttgtccgtaccgcggagaatcgaactctatgcagggcgcgggcgtaaagaaaacgcgtaagcgtttttagcccgcgggcgaggacgccggcaggcggccgaagccggtg

SEQ ID NO: 30268 - DNA, 260 bp, Unknown; identical to SEQ ID NO: 30251
  Description of Unknown: RightRegion for integrase B4269 sequence

SEQ ID NO: 30269 - DNA, 260 bp, Unknown
  Description of Unknown: RightRegion for integrase B4270 sequence
ataaaagcacccgccgtaccccggcgggtgtttttgttttggtgctccgtgagctgctgaggagtcgaacagggcggcagtaccgcagtaccagcccgatggccgatgcggaacgcggatgccgtgcgttcgtcatcctcggtggaatcactctcattataccagtggtttgcccggtgcttgaatgccctgcgaacagcccgcctgcccctcatacagggcaggcataaaaataccacggtgcagaattgcatcgtggt

SEQ ID NO: 30270 - DNA, 260 bp, Unknown
  Description of Unknown: RightRegion for integrase B4271 sequence
acttgcatcgttagagtatcgaaaaactggtttgttgtcgttggcacgtgtcaaaaatagcaatttcttgtttttgcaaaacaccagatgggcggcttgatgtaagcccgtataacgccagaaagcggggcaccccttgtcagggtaccccgcttgaacactaataagaaagcttctggccggggtagatcgtataaggtgccccaatgccgttcttgcttgctatggtgcgccagtcgataccgagcgaagcgccaatc

SEQ ID NO: 30271 - DNA, 260 bp, Unknown
  Description of Unknown: RightRegion for integrase B4272 sequence
gactttaagcgcggagatgagatcactttcaccctggatatctaccccaaaatccaatagaaataccattgataacctctctgtaccgacgaactggcacacatggaaatggtagccaccattgtacaccagcttacacgcaacctttccatggaagaaatcgagaaatccggcctcggtccctactatattgaccatacagtaggcatctggcctcaggctgccgggggtgtcccctttaacgcctgtgagttccagtc

SEQ ID NO: 30272 - DNA, 260 bp, Unknown
  Description of Unknown: RightRegion for integrase B4273 sequence
cctggtatcggaagatacgttgaaaacgtttttaaacttgatatcttttataagttgtaaaccatatccaacatctatgcgctaatgagcttggtcatttggaaatggtttccaccatcgtgtaccaattaaccgatggtctttcaccagaggaaatcaaagccagcggttatgacaaatactttgtcgatcatactttaggtgtctatccgcaggccgcatccggaactccattttctgccgatacgttccaatctacc

SEQ ID NO: 30273 - DNA, 260 bp, Unknown
  Description of Unknown: RightRegion for integrase B4274 sequence
ttcgccgaccacttcactgtggaattcaagtccgggatcacaatcaacatcgaagcataaccccctcagataaaagaagccctctcaacattgtagctgagagggtgtgtttttataagctatgtacaggccttataggagtatctccgaattcaggaagcaatttcccttctatgtacttatcaaatattgataaacacaaaaaagttactataccatcgtcatcttgaagttcaatttctaatggctttgatgataca

SEQ ID NO: 30274 - DNA, 109 bp, Unknown
  Description of Unknown: RightRegion for integrase B4275 sequence
gctgtcagtggtgacggttgcaaaggttcagcttttgcgccgtcaagcgcattaaaataataatcaggtgtgataaaggcagcggtatcgaaatataaagatgccgctg

SEQ ID NO: 30275 - DNA, 260 bp, Unknown
  Description of Unknown: RightRegion for integrase B4276 sequence
gactttaagcgcggggatgaaatcacctttaccctggatatctaccccaaaatccaatagtaatatcattgataacctcaatataccaacgaatgggcacattgaggttatcaatggtttggaactgtcgaaaaacgtcttgctattcatcttgcgcagcatatgcgcgagtgatataataaaaccatagaagtgagtgtagaaatgcgcagaacggccggcactgtaatggtgtcggccgttctgcgtataagtatatg

SEQ ID NO: 30276 - DNA, 109 bp, Unknown
  Description of Unknown: RightRegion for integrase B4277 sequence
aaaaatggtgatgacatctcttttactttagatatttatccgaaaatccagcaaaagtaagtgtgggtagcctttatgtacctacacattggcacgtatcgtgtcctcc

SEQ ID NO: 30277 - DNA, 260 bp, Unknown
  Description of Unknown: RightRegion for integrase B4278 sequence
ttaaccgtgatggtatcgcaggacttttttacagtccggatccggcggcaagctgcataaaaaataaaggccatagcgtaatactcggctatggcctttattatatcatcatcgtgcgattttatacagtcttggtgggttcttccttggtattctcttccgttgctttagtcagcacggtcttcactacaaataccagaccttccatgacaagcgggagaacaatgccatcacggacgcggcaccagccggattcctga

SEQ ID NO: 30278 - DNA, 260 bp, Unknown; identical to SEQ ID NO: 30250
  Description of Unknown: RightRegion for integrase B4279 sequence

SEQ ID NO: 30279 - DNA, 260 bp, Unknown
  Description of Unknown: RightRegion for integrase B4280 sequence
atgttcgttttgactcctgattgctccaccagaacgaaagcactacacggaaacgtgtagtgcttttttgtcgctgccaaacgagtgagggtttagctcacccaggagagtgccgtgcatggactgcaagaggatcaccgtgatcagaatcggcccggtaatctccaccagaatgaaagcactacacggaaacgtgtggtgcttttttgttttatctgccattcaccttacgtcccctttcatgaaaaaagcgtttgtcg

SEQ ID NO: 30280 - DNA, 260 bp, Unknown
  Description of Unknown: RightRegion for integrase B4281 sequence
tacgaagataaattcaccgtggaattcaagtccggcttgacggtggatgttgaggaataggcgcgaaaaaattagaaggcattctacggatttgacgtagggtgccttgcttgttaaccaactattgaaatactaaaattatgatactgaataagttggcggcaaaatgcgatattgcgctcatccacgcattgtttgttttgtaaaaaatgattccatacaagacactgttgatgaatacaaaaaagacatcatatagt

SEQ ID NO: 30281 - DNA, 109 bp, Unknown
  Description of Unknown: RightRegion for integrase B4282 sequence
ttacagataccgcggagaatcgaactctatgcagggcgcgggcgtaaagaaaacgcgtaagcgtttttagcccgcgggcgaggacgccggcaggcggccgaagccggtg

SEQ ID NO: 30282 - DNA, 260 bp, Unknown
  Description of Unknown: RightRegion for integrase B4283 sequence
ggaacggtcgatatccctacttttgaacttacattaaagcctcgaatcccccggatttaggggcttttcttttactgataacatttttgtaccaacgaactggctcaccttgaaatcatctgtgccattgtgcatcagcttacccgtaatcttacaccagaacaaattgaaaaatccggcttcgacaaatattatgtagaccacacactcgcactctggcctcaggctgccagcggaactccttggagtgctacaacatt

SEQ ID NO: 30283 - DNA, 260 bp, Unknown
  Description of Unknown: RightRegion for integrase B4284 sequence
acttgcattgtaagggtatcgaaaaactggtttgttgtagttggaacgtgccagaaatagccatttctggtgtttgcaaaacaccagatgggcggcttgctgtaagcccgtctaacgccagaaagcggggcaccccttgtcagggtaccccgattgaacactaataagaaagcttctggccggggtagatcgtataaggtgccccgatgccgttcttgcttgcgatggtgtgccagtcgataccgagcgaagcgccaatc

SEQ ID NO: 30284 - DNA, 260 bp, Unknown
  Description of Unknown: RightRegion for integrase B4285 sequence
tttttgctctttgcagaaggacatttttccaattccaattttttcaaaatgcgcaactaaattcagttgcatttttatctttttgtgctatactatatgagaaagggaggcatgcggcttgggacaaaaagaaaagctcatcaaaaagctgaaatccgttccgaaggacatgacctttgaagaggtcgaaaccctcttgcgctatctgacctatctgcgttccaacaaagggaaaaccagcggttcgcgcgtcttatttt

SEQ ID NO: 30285 - DNA, 260 bp, Unknown
  Description of Unknown: RightRegion for integrase B4286 sequence
aaccaaatacttattataggtttggttctggttcaaacaaggaaacaccttatggtatagcgccgtaaggtgtttttgcttttctatcaaaaagaggaaatgccccacgcagtaacagcgcggggcattctctttgtcggaataaaatttccaactaggattgttagcatttcctattgtaccgaattattccaaccattgcaaccatatttcaaacttgcttcaaacttgcctcaaactatcttcagccttgcgactta

SEQ ID NO: 30286 - DNA, 109 bp, Unknown
  Description of Unknown: RightRegion for integrase B4287 sequence
atggtcaagagaatcgaagttaataaggatggagaggtagacgtccagacatacgtttaactgtgcgtgcttgaaaacacatcacgaacgtcatgcaaaagttgaatgt

SEQ ID NO: 30287 - DNA, 260 bp, Unknown
  Description of Unknown: RightRegion for integrase B4288 sequence
tatgagattgaaattgtgtttgatcttaactatgagcagtttttaaatacaagtaaataactgtatgttcattgctcatataaaaatattaattcagaatattgtaatataagaattattaaaaaagcatccgtcacattgtgtttataagcataatgatgtttatatataatcttagcttattagtataactttgtgttttgtatgattttgtagtgtgtacacaaaagtacacacataaacttggttatattgcacaa

SEQ ID NO: 30288 - DNA, 260 bp, Unknown
  Description of Unknown: RightRegion for integrase B4289 sequence
tttccacgctcatatatatgggtgtggaattttttgtttacggtagtacaaaacgcataaaaattcagcttgtagaaaaagtctgtttttgaaataaacttctgatttattatccctatccccaaacccctttcccctggaaaggggctgagtgtggggctgccgccctcaccccgcttggggctacgccccaaaccccattttcaaaaattatataggtttatcgacagtctgtaaaaattatcccacattttccgtac

SEQ ID NO: 30289 - DNA, 260 bp, Unknown; identical to SEQ ID NO: 30246
  Description of Unknown: RightRegion for integrase B4290 sequence

SEQ ID NO: 30290 - DNA, 260 bp, Unknown
  Description of Unknown: RightRegion for integrase B4291 sequence
acttgcgttgttagagtatctaaaaactggtttgttgtcgttggcacgtgtcaaaaatagcaatttctggtgtttgcaaaacaccagatgggcggcttgctgtaagcccgtctaacgccagaaagcggggcaccccttgtcagggtaccccgcttgaacactaataagaaagcttctggccggggtagatcgtataaggtgccccaatgccgttcttgcttgcgatggtgtgccagtcgatgccgagcgaagcgccaatc

SEQ ID NO: 30291 - DNA, 260 bp, Unknown
  Description of Unknown: RightRegion for integrase B4292 sequence
ggaacggtcgatacccctactttcgaacttacattaaagcctcgaattcctcggatttaggggcttttcttttactgataacatttttgtaccaacgaactggctcaccttgaaatcatctgtgccattgtgcatcagcttacccgtaatcttacaccagaacaaattgaaaaatccggcttcgacaaatattatgtagaccacacactcgcactctggcctcaggctgccagcggaactccttggagtgctacaacatt

SEQ ID NO: 30292 - DNA, 260 bp, Unknown
  Description of Unknown: RightRegion for integrase B4293 sequence
ataaaagcacccgccgtaccccggcgggtgtttttgttttggtgctccgtgagctgctgaggagtcgaacagggcggcagtaccgcagtaccagcccgatggccgatgcggaacgcggatgccgtgcgttcgtcatcctcggtggaatcactctcattataccagtggtttgcccggtgcttgaatgccctgcgaacagcccgcctgcccctcatacagggcaggcataaaaaacacggtgcgtgtgcatcgtggtttgg

SEQ ID NO: 30293 - DNA, 260 bp, Unknown
  Description of Unknown: RightRegion for integrase B4294 sequence
tgggatgaccacatcaccgtagaactaaaatccggtgtcagcatcgatgttgatgcatgactccatagacgcacgaaggctcctcaccactggataatctccggtgatggggagcctttgtttacaagttgattatcattcctcgtcgatttctttctgagccgatgtggttaattccatcatcttttgttgataagtagctccatcaatttcttcgtcagcatactgtctcattaattcatcaatctgtgcttttaatt

SEQ ID NO: 30294 - DNA, 260 bp, Unknown
  Description of Unknown: RightRegion for integrase B4295 sequence
ggaacggtcaatacccctacttttgaacttacattaaagcctcgaatcccccggatttagggacttttcttttactgataacatttttgtaccaacgaatcagtacaaaaatggtatcagttagtttcatattatataggtagatactcgttcctttatcagagcatctgcagtcgtatccagcactgctgccagtatcaccagcatctctgcatccagaactctatcttttttcagttatcctacatacgtcttaccac

SEQ ID NO: 30295 - DNA, 260 bp, Unknown; identical to SEQ ID NO: 30230
  Description of Unknown: RightRegion for integrase B4296 sequence

SEQ ID NO: 30296 - DNA, 76 bp, Unknown
  Description of Unknown: RightRegion for integrase B4297 sequence
cacctaacagcttttgctgtgtggcgaaatgtatttatcattgatatacctgtagaataagagaaatacccttgaa

SEQ ID NO: 30297 - DNA, 260 bp, Unknown
  Description of Unknown: RightRegion for integrase B4298 sequence
gagccagcggctcaatcgtctggatatcgggaaagccaagtccccgctcccaccggctgacggctttatccgtcacatgaatcttttccgcaagctctgcctgcgtcatctttttctcttttcgcattccggcaataaaccgcccgaactctttcacttccacgtcgtgtcccttcctcctgctgttcccgcaccgcctcatgttgcccagcggagcgtttttacagtctcagaataggcgaaaataggctgttttgtca

SEQ ID NO: 30298 - DNA, 260 bp, Unknown; identical to SEQ ID NO: 30260
  Description of Unknown: RightRegion for integrase B4299 sequence

SEQ ID NO: 30299 - DNA, 260 bp, Unknown
  Description of Unknown: RightRegion for integrase B4300 sequence
cacatcgatttcagccgcgagaacaacgccgagtttatattagacgtctatctcaagtgagatgggcgcatggtcggagccgagtatgtcagtgtgaatttcggctgatctgatgcactctcgcgcgaaatcagacacgaggaagtagtccagacgccagccgatattccgagcccttgcacccgctcgatagctccaccagctatacttcgcttcatcggggtgcaggtcgcggaacgtgtcggtataccctgcctcca

SEQ ID NO: 30300 - DNA, 260 bp, Unknown
  Description of Unknown: RightRegion for integrase B4301 sequence
ctcgtcaacaatattgtttttaatgcggatggcgaagtcactatttcatttgccatttaactcttttctttttactttctgcacttctttactgttcaagtgatgatatacttgtatagtaaaagaagtgcaatttttatctaactgtataatccagactaatccatcctgcgccagatttgagcttgccccaacgtttcgcaccttttcctgtcgcctcttccgtgatcgtcaatgacatcttttctctgatctggccc

SEQ ID NO: 30301 - DNA, 260 bp, Unknown
  Description of Unknown: RightRegion for integrase B4302 sequence
tctatcactctaactgatgataaatttatagtagattttaatattaaaaaaaaaaactagataatgctataaaaaaattatctagtctattcgcaaaatataaatcatcgcaattaagacatccatgcagaagctatatgtacaggcaccctagctggccataattcagtaagacttgcactaggattgccacttcttatccttccaagttcaattgctattggagatataatttcatatgaaaatgaacaatctaaaac

SEQ ID NO: 30302 - DNA, 260 bp, Unknown
  Description of Unknown: RightRegion for integrase B4303 sequence
gctcgcgctgtgattcaggagtgtacttgggacggggagcggctttttattaagctctaaacctcactatttcataatggtggggtttggccgcatacgaagtgcgctttttatcaaatcccggatggtaatctcctctgcccccggaagcttgatatcccggctctccagacgcaccagattgggtagcccaagcaactgcagctccgctgagtcctcaatggtaaccacacgttcttcttttggaataaattccgaca

SEQ ID NO: 30303 - DNA, 260 bp, Unknown
  Description of Unknown: RightRegion for integrase B4304 sequence
gactttaagcgcggagatgaaatcactttcaccctggatatctaccccaaaatccaatagaaataccattgataacctctctgtaccgacgaactggctcacatggaaatggtagccaccatcgtacaccagctcacccgcaacctgccgatggaggaaattgagaaatcaggcctcggcccctactatattgaccataccgtaggcatctggcctcaggctgccggaggtgtccccttcaatgcctgtgagttccagtc

SEQ ID NO: 30304 - DNA, 109 bp, Unknown
  Description of Unknown: RightRegion for integrase B4305 sequence
ccggggattggcagatatgttgataatgtattccagcttgatatttttttactcttataatatccaacatctatgtacctatgaattggcgcacctcgagatgattgcc

SEQ ID NO: 30305 - DNA, 260 bp, Unknown
  Description of Unknown: RightRegion for integrase B4306 sequence
cctttcaccaaaaaagatgcgaaagtattcattcacgtatatccaaaaaccccggaataacttgggttctcaacccatgacaacatggcggtgcagactcttccgtgccgatatcggtaactatatggtacctttaatttccggtttaatatacgaatattcaagtatttccgtcatataattgtctcttcgtccggttgtttttactttaagttgaataccaaacggtaatggcttcagccatacatcaagaattttat

SEQ ID NO: 30306 - DNA, 260 bp, Unknown
  Description of Unknown: RightRegion for integrase B4307 sequence
gccctttgttattatggagtttgtctcatttttgtttattcgttaaaatgttttttataacttgtcagacaccttgattatttggtttttttctatttaaccaaggtgtctgtttttttagcttttttccttaaaatcttaatattataggagttaaaaaaactgtatacatatttataggcatacatccactaaatattttgtattaagtgacggctctcttgctgaactgcaaattatgcacagctcacttgaaatgg

SEQ ID NO: 30307 - DNA, 260 bp, Unknown
  Description of Unknown: RightRegion for integrase B4308 sequence
cacttttatattaacgctaccgcctaccctattactttaatagtgccttttggcgtttaaactatataatgtattatataagatatattagttataatacaatgtattcagcataaagaaaagctctataaacgaaaaataaggcctatcgtgctagtatctactaatcacgataggcctattttatttaccaatcatcaataacacagagctatgtgtccaccctcacatagtaggaagataatcggatcacctcgatt

SEQ ID NO: 30308 - DNA, 260 bp, Unknown
  Description of Unknown: RightRegion for integrase B4309 sequence
tataatgatcactttacggtagaacttaaatccgagcttaaggttgatgtagaaagatagtcataaataacaaaggctcctcaccactagaactcaatctcgtgatggggagtcttttcttatgcaaattcttttattgcatatattgcgataaaagataatgaaaccgacattattgcaaaagcagctggccatcctaataaggatacagatacactacttctctttgctaattctgatgctccgtatgtcaatttatc

SEQ ID NO: 30309 - DNA, 109 bp, Unknown
  Description of Unknown: RightRegion for integrase B4310 sequence
ccggggattggcagatatgttgataatgtattccagcttgatatttttttgctcttataatatccaacatctatgtacctatgaattggcacatctcgaaatgattgcc

SEQ ID NO: 30310 - DNA, 109 bp, Unknown
  Description of Unknown: RightRegion for integrase B4311 sequence
ccaggcataggacgatatgtagacaatcctttcagattagaaattttcctgaagctgtaaacccgcagtttcaggggatttcttatcacatacaacaacatggcgtaag

SEQ ID NO: 30311 - DNA, 109 bp, Unknown
  Description of Unknown: RightRegion for integrase B4312 sequence
acaattatagataaaatagttataaccgataaaaatatagatatacactacaagatttagtgtatgtctttttgaatttaatgtatcattattaaaaactaatattttt

SEQ ID NO: 30312 - DNA, 260 bp, Unknown
  Description of Unknown: RightRegion for integrase B4313 sequence
aggtattggacgaacacctatttcttcagcggcggctttgccgtcaaggtgatgctctaatacgaaacagaaaaccgccatcttagattaagttctaaggtggcggttttacatataagcaagtcgtttgaaaaacaagacaatatctgttataatataaacacagaataatattgagtgtaaacgaaataaggagaaccatttatgtgggaaaatattgatattgataggcattacacaggaatgtttcaaattttaga

SEQ ID NO: 30313 - DNA, 260 bp, Unknown
  Description of Unknown: RightRegion for integrase B4314 sequence
tccgatccgcaggattttgaggttaagattttccccaggctgcctgagcctgtggagtagtataaccacggtgtatagcattggtggtggatcataatcctcttgctgatcctcggctggggcaataatggttgtggctgcggctgtgacaacggctgcaacagcggctgtggctatgacaacatttggtggatcatcatactgctgctcattctcggcggcggctttaacaactgcggctgcgacaacggctgtggcaa

SEQ ID NO: 30314 - DNA, 260 bp, Unknown
  Description of Unknown: RightRegion for integrase B4315 sequence
atcacggtttatgagaacggagaaaaaacagttactttcagagatggaagtgtgatatagaggaatgataaaataaagggtctgctgcagtatctgcgtactgcaacagaccctttttgtttgactccttaagaggtagtggatatgcgttttggtctttcaaatatctgattgataaaaagaagaaatggatcaaatacccgattaaacagccacatataaattgagccaaatacatttgtaaaaatacgaagtaaaac

SEQ ID NO: 30315 - DNA, 260 bp, Unknown
  Description of Unknown: RightRegion for integrase B4316 sequence
gctgttgatagaatatctctaaaagatatagtaagacaaattccctcacctactaagtaagcaagggagtttattattgtaaatgcagcgtttcttttaaggctttttgtagtacttgcgaaaaattgatgccttcactttccgcaacacagtttagccatgaaggaagagttacagttttattgacagaaatatttttaacttttgcgcgaaccaatggcatatatacgcttacaagtaaagggatttggcctttttct

SEQ ID NO: 30316 - DNA, 260 bp, Unknown
  Description of Unknown: RightRegion for integrase B4317 sequence
tgcaataacattcacaaccgggcagaagaaattattttgcaagagatgatttattcataacggtatggtagaatgattatgacaaatcgaaagttgacaaggagttttgatagcgtgaaaaaaatatttcttaaaattgtgataggggttgttcttgcttgtattttatttgtttgttttctttatacgaacaatgagatcggcgtgacttcatctaagctggaggcagatattcgttcgtcgcagaagattaaggatga

SEQ ID NO: 30317 - DNA, 260 bp, Unknown
  Description of Unknown: RightRegion for integrase B4318 sequence
aagaaatgtgatgaaataacttttacccttgatatttaccccagaatccaagggaaataattaaaggtagcatttacgtgccagtacattcgcccggatcgtatcgtccggccaggtcgcatagatttcgctgctcgctacgtttttgatgtaatctttgtaacgcacataatagtcccttgctgtcgtatcgttcacggacccatcatggacaacgatgtattccgggatcactacgcggctcagaacgatctcgccgc

SEQ ID NO: 30318 - DNA, 260 bp, Unknown
  Description of Unknown: RightRegion for integrase B4319 sequence
tccgatccgcaggattttgaggttaagattttccccaggctgcctgagcctgtagagtagtataaccacggtgcatagcattggtggtggatcataatcctcttgctgatcctcggctggggcaataatggttgtggctgcggctgtgacaacggctgcaacaacggctgtggctgtgacaacatttggtggatcatcatactgctgctcattctcggcggcggctttaacaactgtggctgcgacaacggctgcggcaa

SEQ ID NO: 30319 - DNA, 260 bp, Unknown
  Description of Unknown: RightRegion for integrase B4320 sequence
cacaaattacaaaaaacaaatattaacataaaaagcagaaatcctcatagaaatctgtaaaacttagttccattataatcaatacaaatcttcacataaataatttttttcaactttactccagtctattacgttccatatatttttaacataatcagctctcaaattttgatactttaaataatatgcatgttcccaaacatcaattgttaatattggcttcatctttaagcttagtggtgaatcttgatttgcagttg

SEQ ID NO: 30320 - DNA, 109 bp, Unknown
  Description of Unknown: RightRegion for integrase B4321 sequence
ccttttactaaaaaatatgcgaaagtattcattcacgtatacccaagaaccccggaataacctgggttcgtaacctatgacagcatggcggtgcagactcttctgttcc

SEQ ID NO: 30321 - DNA, 260 bp, Unknown
  Description of Unknown: RightRegion for integrase B4322 sequence
gttgaatactttatttatgattcagaaaatggaactgttgaatataaaataaggctgtagttatctatggccttatttgttgtttagaatgtgttgcatctgcgccttgccctgttgacaaatcaatagatagaccttcttcttcaaaaaatccttcatttattgcaatatacatcggagcgtaaaacacagatctcacaacttcatttaaccttacagtcttcaattcattagttgtttctcctccattatctttagta

SEQ ID NO: 30322 - DNA, 260 bp, Unknown
  Description of Unknown: RightRegion for integrase B4323 sequence
gaaataaccttcaatctgaagtgcggactgaatataacggaaaggttggtggtggtgtgacacatactccatacggttacattattgaagacgggcaagcggtcattgatgaaccaaatgcagaaagagtgagaatgttattccgagaatacattgaatgtggctccataagagcggcaggcaagaaagtcggaattgaaaaaacgcactcggtaattggcagatttctaaaaaacaaagtgtatgttggaaccgagtat

SEQ ID NO: 30323 - DNA, 132 bp, Unknown
  Description of Unknown: RightRegion for integrase B4324 sequence
gaaagtgtaacatacaaagatgatatgtttcatatatcatttaaattaaaaaaaaactaattgatatttataaaaatttatctatgttaaataagttatactctctatcgcattttagattatcaaggttgg

SEQ ID NO: 30324 - DNA, 260 bp, Unknown
  Description of Unknown: RightRegion for integrase B4325 sequence
gagtcttgcatgactttcctattatatcatggatgcgcgatatttcaactggcggcgtaaaaattccccctgccgatgtggcagggggtcttgttatttgcggacgatatagcgcaggtagcgctcgaccttgtccggctgtgcgtccgcgtcgcggatgaagtcggcggccatgtccgcgtagaaatccgggctgtggatgccgtagcgcttggccgtggcggcgtagtcgctgtacatggcattggccaccgcgtaga

SEQ ID NO: 30325 - DNA, 260 bp, Unknown
  Description of Unknown: RightRegion for integrase B4326 sequence
gcacataaagtattgaaagaatgtgtatggaacggtgaaacactttttttgcgcctttaatgtcccgtaatcattgtgcgcccatccggtcgcacagtgattacgggaaaacgtctacatttatactacatttatatataaaagaaaaagatatcacttgacataggtatatacctatagtataataaaaccgtagaaaggaggtaataagatgtggataacataaaagatgctttagaaataacaaaagacctgttaga

SEQ ID NO: 30326 - DNA, 260 bp, Unknown
  Description of Unknown: RightRegion for integrase B4327 sequence
gcacataaagtattgaaagaatgtgtatggaacggcgaaacactttttttgcggctttaatctcccgtaatcattgtgcgcccatccggtcgcacgatgattacgggaaaatatctacatttatatataaaagaaaaagatatagcttgacataggtatatacctatggtataataaaaccatagaaaggaggtaataagatgtggataacataaaagatgctttagaaatagcaaaagacctgttagaaatcttagtct

SEQ ID NO: 30327 - DNA, 109 bp, Unknown
  Description of Unknown: RightRegion for integrase B4328 sequence
ccaggcataggacgatatgtagacaatcctttcagattggaaattttcctgaagctgtaaacccgcagtttcaggggatttcttatcacatacaacaacatggcgtaag

SEQ ID NO: 30328 - DNA, 260 bp, Unknown
  Description of Unknown: RightRegion for integrase B4329 sequence
tcagattcgcaggattttgaggttaaaattttccccaggctgcctgaacctgtagagtagtataaccacggtgtatagcattggtggtggatcataatcctcttgctgatcctcggctggggcaataatggttgtggctgcggctgtgacaacggctgcaacagcggctgtggctatgacaacatttggtggatcatcatactgctgctcattctcggcggcggctttaacaactgcggctgcgacaacggctgtggcaa

SEQ ID NO: 30329 - DNA, 226 bp, Unknown
  Description of Unknown: RightRegion for integrase B4330 sequence
cgggaggatccggacagtttcatcctggatgtttttctgaaagacgatattatcgactaagaaaaagaatcacgcaaacacaagaaaaggtattgctgcggcaatgagtatcattatggcgatgtaaaggtggagccggccagcattgcgaagcagaggagcagcgaggtaaagctcatgagcagcgcgctttttttgcttttcatgtgttttttctcctttatct

SEQ ID NO: 30330 - DNA, 260 bp, Unknown
  Description of Unknown: RightRegion for integrase B4331 sequence
gcacataaagtattgaaagaatgtgtatggaacggtgaaacactttttttgcgcctttaatgtcccgtaatcattgtgcgcccatccggtcgcacgatgattacgggaaaaatatctacatttatatataaaagaaaaagatatcacttgacataggtatatacctatagtataataaaaccatagaaaggaggtaataagatgtggataacataaaagatgctttagaaataacaaaagacctgttagaaatcttaatc

SEQ ID NO: 30331 - DNA, 109 bp, Unknown
  Description of Unknown: RightRegion for integrase B4332 sequence
atatgcaaggacggcggtatggttttcctgtttaaggacgggacggagatcggggtatgaaatgcattcagaatggagagccttcaacaataaaaggctctccatgtct

SEQ ID NO: 30332 - DNA, 109 bp, Unknown
  Description of Unknown: RightRegion for integrase B4333 sequence
ccggggattggcagatatgttgataatgtattccagcttgatatttttttactcttataatctccaacatctatgtacctatgaattggcacatctcgaaatgattgcc

SEQ ID NO: 30333 - DNA, 260 bp, Unknown
  Description of Unknown: RightRegion for integrase B4334 sequence
gcacataaagtattgaaggaatgtgtatggaacggtgaaacactttttttgcgcctttaatgtcccgtaatcattgtgcgcccatccggtcgcacagtgattacgggaaaatgtctacatttatactacatttatatataaaagaaaaagatatcacttgacataggtatatacctatagtataataaaaccatagaaaggaggtaataagatgtggataacataaaagatgctttagaaataacaaaagacctgttaga

SEQ ID NO: 30334 - DNA, 260 bp, Unknown
  Description of Unknown: RightRegion for integrase B4335 sequence
tggcaggggcggcaggattcgaacccgcgacattcggttttggagaccgaaaaccaatagagataacatactgtttttatatattatttttctttcattctgacttttaaattttcttattctgactcttgctacgtgagaaagaacattgtaagaacaaaattagttgtggcacacttccaattcttgtcgaagtttatcaatcctgactttcactagctagtatatcacaagttttgtaaaatctattcaggaaatct

SEQ ID NO: 30335 - DNA, 260 bp, Unknown
  Description of Unknown: RightRegion for integrase B4336 sequence
ggctttaaacacggtgacgagatcacatttactctggacatttaccccaaaatccaataaaaagcttattgataacctctatgtactgacgaataggcacatagaggttatcaatggtctgtgattcgtcgaaaaatgtctacgggcttttattgcccgtatagattagatgtggtaatatatccatagagatgaaatcagatatgatagcggaatggccggtactgtaatggtgccggtcattttgcgtataagcgtac

SEQ ID NO: 30336 - DNA, 260 bp, Unknown
  Description of Unknown: RightRegion for integrase B4337 sequence
tatcctgaccattgtaccgttgaattaaaatccggccttaaggtcgatgtagaaaagtaaatataaacgtaaaacgcacaaaaccctcctgaccatgatggccgggagggttgtttttgttatattgtgtgaactggtctgactggagtatctccaacttcaggtaacagtttcccatccacataatcatcaaaattagaaagacaaggaaatgtcactactccatctttatcttggaattctatctctagtggtttaga

SEQ ID NO: 30337 - DNA, 260 bp, Unknown
  Description of Unknown: RightRegion for integrase B4338 sequence
gcacataaagtattgaaggaatgtgtatggaacggtgaaacactttttttgcgtctttaatgtcccgtaatcattgtgcgcccatccggtcgcatgatgattacgggaaaatatctacatttatatataaaagttgagcatatcacttgacataggtatatacctatagtataataaaatcatagaaaggaggtagtaagatgtggataacataaaagatgctttagaaatagcaaaagacctgttagaaatcttagtct

SEQ ID NO: 30338 - DNA, 260 bp, Unknown
  Description of Unknown: RightRegion for integrase B4339 sequence
ggcgctgtcagtggtgacggttgcaaaggttcagcttttgcgccgtcaagcgcattataaaattaaaaagggttaagccttagggcttagccctttttgattttagaagcggaagcggcccttgtccccatgggtccaaggtctccgctccgcttcggtcgttgcaagacgtcccccagacgtcttgcaacccatcttccgcaaggctctggttgtggtagctaaattatacggatttcgtttaaaattgcatattagat

SEQ ID NO: 30339 - DNA, 260 bp, Unknown; identical to SEQ ID NO: 30330
  Description of Unknown: RightRegion for integrase B4340 sequence

SEQ ID NO: 30340 - DNA, 260 bp, Unknown
  Description of Unknown: RightRegion for integrase B4341 sequence
ttattttttattgatactagattattttgtcaaataatatgtatgttaaaaaataattagttcctgagacacgtataatgcgtgtctcttttttatgtttagaatataaaataaatttatttactctttaaaatcgggtagacataattagattaatatgctatattttatatatcttaattattaatttttggggggaaaataatatgaatattaaaaaagactttcattatattaatatataataacacaaaataaaa

SEQ ID NO: 30341 - DNA, 260 bp, Unknown
  Description of Unknown: RightRegion for integrase B4342 sequence
tgggatgaccattgcacggttgaattgaaatccggacttatggtcgatgtagaaagataagcatagacgcacaaaaccctcccagccatgatggttgagagggttgtttttatcgtccaaagaattcctgaaatacctttttatcttcgagcttatattttttatcaaaatcagatgtgtaatcagttaacatcaattcatcagcatcaatcgaaatcttcacatttccatttttcttaaaaaagccaaatgcatcaagt

SEQ ID NO: 30342 - DNA, 260 bp, Unknown
  Description of Unknown: RightRegion for integrase B4343 sequence
tgggacgataggttttctgtggagttgaagtcgggaattgttgttgagattgaattataatttttgaatatgtacgaacccctctcggctgtgatggtcgggaggggctatgttatgtattatcaattttggggctgattttctttatttctcttgcacgcaaattatcaatgaaattagcgtacttatcacagtattcctgaagttcagataataattcgtcaatatcgtcttttgccgtttgggttaagtctaacacg

SEQ ID NO: 30343 - DNA, 260 bp, Unknown
  Description of Unknown: RightRegion for integrase B4344 sequence
aatgagatcggctttgtgctgaaatgcggattgacgctcagagaaaggattggtgagtagaatggagcatattccgtacggctatcgtattgagaacggaaaagcggcggttgatgaaactgcggcagagcaggttcggagattatttgaaaactacctcagcggcgattcgctgaaaaaagcggccgaaaacgcaggtatcacaggaaatcacggcactatcaaactgatgttgctgaaccgccgctacttgggagatg

SEQ ID NO: 30344 - DNA, 260 bp, Unknown
  Description of Unknown: RightRegion for integrase B4345 sequence
acaattatagataaaatagttataaccgataaaaatatagatatacactacaaaatttagtgtatgtctttttagttttaatgtatcattattaaaaactaaaatttttgccaaagtaaaatcctcctcatactttttatttattatatgaaaaggatttgcttttggttatatgtgtttaactaattattttacaaattaattatctattttacttctttgcattttactataattcttaatgaactatcatcagtaca

SEQ ID NO: 30345 - DNA, 260 bp, Unknown
  Description of Unknown: RightRegion for integrase B4346 sequence
ggtaatccagatagtgacgcatgggaatactggaaaagttttttggacaatctaaagtaaattaatggcccctggttatgggggctttttttgtctttatgataaatacttttataaaaataattataaggaaactattatgaaagattggtttattactttgacagtattattgattggtatgattataatggtaactggattcataaaagtattgtttttaatgtttctgatatatcttgtattagtactaatatctt

SEQ ID NO: 30346 - DNA, 260 bp, Unknown
  Description of Unknown: RightRegion for integrase B4347 sequence
ttgtctgccaaaaaatgcagatacccttttgggtatctgcattttttattgcagtcgtgagggattcgaacccatctaaatgcaagtgccctgtgggcacttggcgcagccagttcaaaaactggctgccaccttacgttccgcctcccggcggaacggcaatcgaatccctcatcctctgccctcaattccacctgcacgagaagaaaacggattgtggccgaatggaatcccaagagggatcacaccagtctgcggat

SEQ ID NO: 30347 - DNA, 109 bp, Unknown
  Description of Unknown: RightRegion for integrase B4348 sequence
cctttcaccaaaaaagatgcgaaagtattcattcacgtatatccaaaaaccccggaataacttgggttcttaacctatgacaacatggcggaacagaatcttccgtgcc

SEQ ID NO: 30348 - DNA, 260 bp, Unknown
  Description of Unknown: RightRegion for integrase B4349 sequence
gaggacagcgaacaagtgttcgtccgctgtgcgcgatggacgaccatattggtgcaatagaatagatgcacacctcgaaaagctcgtatttacgagctttttttgcgttttgagggtgaaaatttcaggtgttgttgcccgccgcgcaaaacccaaaaaacgcaacaatccgtaagtaaacgtgaaaaatatacaaaacccttaaaaaccctgcaattacagcgttttcggagtgcaataaactgattgatgtgtaatga

SEQ ID NO: 30349 - DNA, 109 bp, Unknown
  Description of Unknown: RightRegion for integrase B4350 sequence
ccaggcataggacgatatgtagataatcctttcagattagaaattttcctgaagctgtaaacccgcagtttcagggggtttcttatcacatacaacaacatggcgtaag

SEQ ID NO: 30350 - DNA, 260 bp, Unknown
  Description of Unknown: RightRegion for integrase B4351 sequence
tccgatccgcaggattttgaggttaagattttccccaggctgcctgaacctgtagagtagtataaccacggtgtatagcattggtggtggatcataatcctcttgctgatcctcggctggggcaataatggttgtggctgcggctgtgacaacggctgcaacagcggctgtggctatgacaacatttggtggatcatcatactgctgctcattctcggcggtggctttaacaactgcggctgcgacaacggctgtggcaa

SEQ ID NO: 30351 - DNA, 260 bp, Unknown
  Description of Unknown: RightRegion for integrase B4352 sequence
tccgatccgcaggattttgaggttaagattttccccaggctgcctgagcctgtggagtagtataaccatggtgtatagcattggtggtggtcatcgtggttatactgcatataaggagccgcctctaacggccccttttgttatccttatattgtcacgcaatagagcgggacttatccttgctctttgtgacgcctccattgcgcaatcttccgggcgttggcggtcttacttaggccgcaatacatagcccgctgata

SEQ ID NO: 30352 - DNA, 260 bp, Unknown
  Description of Unknown: RightRegion for integrase B4353 sequence
ataaaaaatccgaaccctatgccggttggtcatgggttcggatttattattttgtgttgaaatatgactgactattttgaaaaaatattagggtggattttccggtaatatcctcttgtgtctaattcgttttattcgttttgttttacaaactagtaatgaaactatgctccaatcctttttcttttaatcgaacatcaacattgccattaactaaaaaatagaactcaacaaatattatatcaaatgaagttgatggc

SEQ ID NO: 30353 - DNA, 109 bp, Unknown
  Description of Unknown: RightRegion for integrase B4354 sequence
cctttcaccaaaaaagatgcgaaagtattcattcacgtatatccaaaaaccccggaataacttgggttctcaacccatgacaccctgatggaacagaagaactggcaca

SEQ ID NO: 30354 - DNA, 134 bp, Unknown
  Description of Unknown: RightRegion for integrase B4355 sequence
tcagatccgcaggattttgaggttaagattttccccaggctgcctgagcctgtagagtagtataaccacggtgcatagcattggtggtggatcataatcctcttgctgatcctcggctggggcaataatggttg

SEQ ID NO: 30355 - DNA, 260 bp, Unknown
  Description of Unknown: RightRegion for integrase B4356 sequence
tcagatccgcaggactttgaggttaagattttccccaggctgcctgaacctgtagagtagtataaccacggtgtatagcattggtggtggatcataatcctcttgctgatcctcggctggggcaataatggttgtggctgcggctgtgacaacggctgcaacaacggctgtggctatgacaacatttggtggatcatcatactgctgctcattctcggcggcggctttaacaactgcggctgcgacaacggctgtggcaa

SEQ ID NO: 30356 - DNA, 260 bp, Unknown
  Description of Unknown: RightRegion for integrase B4357 sequence
aatgaaattggttttgcgctgaaatgtggtctgacgctcagagaaaggatcggtgagtagagtggagcatattccgtacggctatcgtattgagaacggaaaagcggtggttgatgaaactgcggcagggcaggtgcggcaattatttgaaaactacctcagcggcgattcgctgaaaaaagcggccgaaaacgcaggtatcgcaggaaatcacggcactatcaaactgatgttgctgaaccgccgctacttgggagatg

SEQ ID NO: 30357 - DNA, 260 bp, Unknown
  Description of Unknown: RightRegion for integrase B4358 sequence
tgggaagacaattgtactgttgaattgaaatctggaattaaggtcgaagttgaaagataaacagggtctgaaaaaataactgtgcaaacgcgaataaacccgaaaaacataccaaagctaaaaatgcagcaaaacaaggcaacgttggagagcgccccgatgcagctgcaagatattctacttcaccggtatctttcggcggataaactccgggagtgtgaggtgacctcccccagtgtgggaggcaaatctatgttcag

SEQ ID NO: 30358 - DNA, 260 bp, Unknown
  Description of Unknown: RightRegion for integrase B4359 sequence
gatgccacgttaaattataataattccgggtgtcgctccaccggcaccaaaccaatataatccgaaccaaatcttcttaatcggagatgggttcggattatttgttttcttcgagaaattcgaggatacgcatttcagaaacggcgtggtaaagcgtcccgaatccaagcccagagggccgagaaaaccaaagatatagaggcgtatctgaacgccgtcacggagtacaagccctatgaaaactgaacaacgcacaaaag

SEQ ID NO: 30359 - DNA, 260 bp, Unknown
  Description of Unknown: RightRegion for integrase B4360 sequence
aatgaaatcaagtttgtaatgaaatgtggtctaacattcacggaaaggattggtgattagatgggccatacaccctttggctatcggattgaaaatggcatcgcaatcatagacgaacctgctgccgcaaaactccgacagctttataaaaattatctgagtggcatgtcattatcaaaggcagctgctgaagctgggataccaacctatcatggaacagcaaagcgattgatgggaactgtccattatcttggcgacag

SEQ ID NO: 30360 - DNA, 260 bp, Unknown
  Description of Unknown: RightRegion for integrase B4361 sequence
tacgaggagaaatttatggtggaattcaagtcaggcacaagcgtgaatgtagagagatagaagtaataggctacagaagttagcaccttgcagaaatgcagggtgtttttctgttgttgcaataattatagctgtaaattatgttagggtgattgaaattcacaaaaatgtgtagtacaataagttatctgatttgtgaaacaagttgagagtaaacaagcagaggtgtagaacatgattaaaaataatatagaactaga

SEQ ID NO: 30361 - DNA, 260 bp, Unknown; identical to SEQ ID NO: 30333
  Description of Unknown: RightRegion for integrase B4362 sequence

SEQ ID NO: 30362 - DNA, 260 bp, Unknown
  Description of Unknown: RightRegion for integrase B4363 sequence
catgaaatccgatttgttatgaaatgtggactgacattcacagaaaggattggtgattaaatggggcacacaccctttggctatcggattgaaaacggcactgccgtcattgataaacctactgccactaagctccgacagctctataagaattatttgagtggtatgtccttatcgaaggcagctgcagaagccggaattccaacctatcatggaaccgctaagcgattgatggaaacagcccattatcttggtgatga

SEQ ID NO: 30363 - DNA, 260 bp, Unknown
  Description of Unknown: RightRegion for integrase B4364 sequence
ttgccatcaatgacaatgtggacaccatcaacggagaaagcgagcttgcaccgttcttaaacatcctgaatgaaatgcacgcccgacagaccagcaaaaaggtcaaggctgccatgcacacaagatttgccaatggcgcacactatggagcctatgcaccgctgggctatgtaaaagacccggacaaaaaaggtcatcttctgatcgacccggaaacacgctggattgtagagaagatttttgaccttgctgtacacggg

SEQ ID NO: 30364 - DNA, 134 bp, Unknown
  Description of Unknown: RightRegion for integrase B4365 sequence
tcagatccgcaggattttgaggttaagattttccccaggctgcctgagcctgtagagtagtataaccacggtgcatagcattggtggtggtcattagggttatacattatagcagccctcttaatatttaggtt

SEQ ID NO: 30365 - DNA, 260 bp, Unknown
  Description of Unknown: RightRegion for integrase B4366 sequence
gctaaaatgttcgttttgactcctgatagctccaccaaaaaagcactgtacttcgcatgaagtacggtgcttttcttttttcgaggccaaatttttggggatgcattgagttgcctgcatgtcttttgggcttttgcggaaaaccgggatgttccctcagataagcgggtctgcctcataacaaaagagaccgctgtacagcaagctgctgcacagcggtctcttcttcttttttagctccgcgggatggccattcgtcg

SEQ ID NO: 30366 - DNA, 260 bp, Unknown
  Description of Unknown: RightRegion for integrase B4367 sequence
gagtcttgcatgactttcttattatatcatggatgcgcgatatttcaactggcggcgtaaaaattccccctgccacatcggcagggggtcttgttatttgcggacgatatagcgcaggtagcgctcgaccttgtccggctgtgcgtccgagtctcggatgaagtcggcggccatgtccgcgtagaaatccgggctatggatgccgtagcgcttggccgtggcggcgtagtcgctgtacatggcgttggccaccgcgtaga

SEQ ID NO: 30367 - DNA, 260 bp, Unknown
  Description of Unknown: RightRegion for integrase B4368 sequence
attgactattttacttatgatagtgaaactaatgaagttggttataaaataaggttgtagctaactctacaacctttttcattgcatgtggacatatgttgtttattagattgtgttgcatcggcaccttgtcctgtagataaatcaatattaagtccttcttcttcaaaaaagccttcatttattgcaacatacattggagcataaaatacagatcttacaacttcatttaatctaacagtttgtaaatttgcttcatc

SEQ ID NO: 30368 - DNA, 260 bp, Unknown
  Description of Unknown: RightRegion for integrase B4369 sequence
gccaaaatgttcgttttgactcctgattgctccaccaaaaaggcactgtacttcgtttgaagtacggtgcttttctttttgctttcttagaggctgcatcgagaatcagccaaatgcctgattttgcaggcggacagattactccccctcgatgtatggggtgaagccgaagttgaacgagatgctgatctgatagcgtttcatgataagcggttctttcgggatgcaaaaaaaaatagccgccagcttcaaagacatct

SEQ ID NO: 30369 - DNA, 260 bp, Unknown
  Description of Unknown: RightRegion for integrase B4370 sequence
tcgcaagggatcattccgggaacgatgcaggtaccgaagaactatcccatctcgaaatgataggctctatagtatcccagctcacaacaggcgagggcgcaaagagctttgaccgatacggagtaggcgcatattatatggatcacgcaaatgcggtttacccatccaatgccggcggtgtgccgtttaccgccgcatacatccagagcaaagccgatccgctcgctgatattcacgaagatcttgcggcggagcagaaa

SEQ ID NO: 30370 - DNA, 260 bp, Unknown
  Description of Unknown: RightRegion for integrase B4371 sequence
cacttttatataaattctaccgcctaccctattactttaatagtgcctttcggtgtttaaagtgtatttaatgtattatataagatatattaaatatattacactactatactataaataaaaggcgttaaatagtcaaaaaaataaaggcctatcgtgctagtacatcactaaccacgataggccttttatgcgtttcagttataaattattactttataactcgttccattttggaacaggttcccatacgtccgccc

SEQ ID NO: 30371 - DNA, 260 bp, Unknown
  Description of Unknown: RightRegion for integrase B4372 sequence
ggagataaggataagcctacttttacactgaatttaaagccccgaatcccgcgtatttaggggctttctcattagcgacaacatttatgggcgcaagaactggctcacttagaaatcgtctgtgctattgtttatcaacttacaaaaaatatgacaatggaagaattagaaaaatccggttttgataaatattatgtagatcatacgcttgcactctggccacagtctgccggcggtgttccttggagcgccactacttt

SEQ ID NO: 30372 - DNA, 260 bp, Unknown
  Description of Unknown: RightRegion for integrase B4373 sequence
gtaaaagacgttgtgaaggagtgcgtctgggacggggtagaacttaaaattacgctttaaaactcacttttttattttgcggccatctgacatcattataaaaaagtgaatattaaaacaaagcagcggcagaggttatcccctgccgctgcttttaatctgtcaagccgggatactggagagctccatcctgatccggcgtgagcgtcaccggatcggtggccatgcggccctcctggtccaggtagtaccatttacca

SEQ ID NO: 30373 - DNA, 260 bp, Unknown
  Description of Unknown: RightRegion for integrase B4374 sequence
gagtcttgcatgactttcttattatatcatggttgcgcgatatttcaactggcggcgtaaaaattccccctgcccgagcggcagggggatcttgttatttgcggacgatatagcgcaggtagcgctcgaccttgtccggctgtgcgtccgcgtcgcggatgaagtcggcggccatgtcggcgtagaagtccgggctatggatgccgtagcgcttggccgtggcggcgtagtcgctgtacatggcgttggccaccgcatag

SEQ ID NO: 30374 - DNA, 260 bp, Unknown
  Description of Unknown: RightRegion for integrase B4375 sequence
gagtcttgcatgactttcctattatatcatggatgcgcgatatttcaactggcggcgtaaaaattccccctgccgatgtggcagggggtcttgttatttgcggacgatatagcgcatgtagcgctcgaccttgtccggctgtgcgtccgcgtcgcgaatgaagtcggcggccatgtcggcgtagaagtccgggctatggatgccgtagcgcttggccgtggcggcgtagtcgctgtacatggcgttggctaccgcgtaga

SEQ ID NO: 30375 - DNA, 260 bp, Unknown
  Description of Unknown: RightRegion for integrase B4376 sequence
cttaatattaatgattttatttcacgcaacatacaacagatgagagaactaactgactagctctctcatctttatatttatgtatttatctaaaagtctactctgctttagtattctttctttactgtaattctctcttatcatttgttctaattttgctttgttttttatgattaacagttctactctgtagctcattaaatcacctcatatgtattataacatattatgtttactttgtctgtcgaaacttgtcgaag

SEQ ID NO: 30376 - DNA, 260 bp, Unknown
  Description of Unknown: RightRegion for integrase B4377 sequence
attgagtattttacctatgacagcgaaacaaatgaagttggatataaactaaggttgtaggtagctctacagcctttcatttattatggacatatgttgttatttagattgtgttgcatcggcaccttgtcctgtagataaatcaatattaagtccttcttcttcaaaaaagccttcatttattgcaacatacattggagcataaaatacagatcttacaacttcatttaatctaacagtttgtaaatttgcttcatcag

SEQ ID NO: 30377 - DNA, 260 bp, Unknown
  Description of Unknown: RightRegion for integrase B4378 sequence
gagtcttgcatgactttcttattatatcatggatgcgcgatatttcaactggcggcataaaaattccccctgccgatgtggcagggggtcttgttatttgcggacgatatagcgcatgtagcgctcgaccttgtccggctgtgcgtccgagtcgcggatgaagtcggcggccatgtccgcgtagaaatccgggctatggatgccgtagcgcttggccgtagcggcgtagtcgctgtacatggcgttggccaccgcataga

SEQ ID NO: 30378 - DNA, 260 bp, Unknown
  Description of Unknown: RightRegion for integrase B4379 sequence
tcgcaagggatcattccgggaacgatgcaggtacagaagaactatcccatctcgaaatgataggctctttagtatcccagctcacaacaggcgagggcgcaaagagctttgaccgatacggagtaggcgcatattatatggatcacgcaaatgcggtttacccatccaatgccggcggtgtgccgtttaccgccgcatacatccagagcaaagccgatccgctcgccgatattcacgaagatcttgcggcggagcagaaa

SEQ ID NO: 30379 - DNA, 260 bp, Unknown
  Description of Unknown: RightRegion for integrase B4380 sequence
gctaaaatgttcgttttgactcctgatagctccaccaaaaaagcactgtacttcgtttgaagttcggtgcttttctttttgctttcttggaggtcgcactgaaaatcatccaaatgcctgattttgcaggcgcatggacggcaacccccaattcttgctgtttcgttatttttgaaaatgcttgttcgatgcccgactgttttgcaggcagacgtatcactccccctcaatgtaaggagtgagatcgaagttgaacgaga

SEQ ID NO: 30380 - DNA, 260 bp, Unknown
  Description of Unknown: RightRegion for integrase B4381 sequence
gagtcttgcatgactttcctattatatcatggatgcgcgatatttcaactggcgtcgtaaaaattccccctgccgatgtggcagggggtcttgctatttgcggacgatatagcgcagatagcgctcgaccttgtccggctgtgcgtccgagtctcggatgaagtcggcggccatatcggcgtagaaatccgggctgtggatgccgtagcgctttgccgtggcggcgtaatcgctgtacatggcgttggccaccgcgtaga

SEQ ID NO: 30381 - DNA, 260 bp, Unknown
  Description of Unknown: RightRegion for integrase B4382 sequence
ggagataaggataatcctacttttacactgaatttaaagccccgaatcccgcgtatttaggggctttttcattagcgacaacatttatgggcgcaagaactggctcacttagaaatcgtctgtgctattgtttatcaacttacaaaaaatatgacaatggaagaattagaaaaatccggttttgataaatattatgtagatcatacgcttgcactctggccacagtctgccggcggtgttccttggagcgccactacttt

SEQ ID NO: 30382 - DNA, 260 bp, Unknown
  Description of Unknown: RightRegion for integrase B4383 sequence
aaggtaacacgcaattggtttgccatcgtgaccttctgtgaatcaaacaataaaaaatgactgaacaatcccaaagatctgcttgcttttctctatggtctaccctataataatagacgtcaagaggaaaggaggtggttcaaatggacgagtttttgaaggacttggcagtagccgtgataagcagcttggttacagtagcagcggaaacggcaatccaagccctaaaagaaaagacctctcgcaaagccgggaagcat

SEQ ID NO: 30383 - DNA, 260 bp, Unknown
  Description of Unknown: RightRegion for integrase B4384 sequence
aaaaagttcgcacaaggtcacgtcgcctccaccagtaaaaaaagccacctgaaaacgtaagttttcgggtggcttttgctatacggagcgatgttgtattgttacgccagatccggtaggatatccgaccacagagcctgctcctgccgcaaagcatcgaagcagcagtccagatacattttattgactgccgcaaaaatggtgctgcgcagcaacagacgctcgtcgttgagcgtagcctccggctgggtggccttgcc

SEQ ID NO: 30384 - DNA, 109 bp, Unknown
  Description of Unknown: RightRegion for integrase B4385 sequence
ggagataaggataatcctacttttacactgaatttaaagccccgaatcccgcgtatttaggggctttttcattagcgacaacatttatgggcgcaagaactggctcact

SEQ ID NO: 30385 - DNA, 260 bp, Unknown
  Description of Unknown: RightRegion for integrase B4386 sequence
gaaagttcgaccgagaagcgtttggtccgagtggcgagaatcgaactcacggcctcttgaaccccattgtgcttctctcaaaaacgcaatggacactccgataccacttgtacgcagtatcatcaaatttcaaaattattttatcattctgtttcgttagatgtcaagatgtttcgtttcttttgtggtcaaattgtggtcaaccgaccctgacaaatgaccattctcccctactaagttacatggcgcaattccgattt

SEQ ID NO: 30386 - DNA, 260 bp, Unknown
  Description of Unknown: RightRegion for integrase B4387 sequence
gaatcaattgtaatagatactgatgaatttattattaattttaacataaaaaaaaactagataatgctttaaacacattgtctagtttgtatcttaagcatatccgttcgcagtttagcatatcacacttcagtatgaccaacaaaaaggcctgacttttctcctgcacagaaaaggttatcaactccaacaaccttcatatcattagttcttggagcaacagataaataccttatagaatttcctttacttcctgcata

SEQ ID NO: 30387 - DNA, 260 bp, Unknown
  Description of Unknown: RightRegion for integrase B4388 sequence
gattccgtcgaagaaaatacggcagaaggttcgtttaagctctgccttgctccaccataagtccaccgtaattttgatagaattacggtggactttttctatgcccgaaaaccgcttgaaatagggcttttcggctgttcaggctcataaacggtaagcgctcaataaccacccgcctataaagcatgcaggcccgcaaccacgggcctgcatgttagtcgagataggtattcacataagcgtcagaattcttcacacag

SEQ ID NO: 30388 - DNA, 260 bp, Unknown
  Description of Unknown: RightRegion for integrase B4389 sequence
gaaagttcgaccgagaagcgtttggtccgagtggcgagaatcgaactcacggcctcttgaaccccattgtgcttctctcgaaaacacaatgtacaatccgatactgcctagactcagtatcgttaaatttcaaatatattatatcattctgtttcattggatgtcaagacgtttcattccttttgtggtcaaattgtggtcaaacgaccccgacaaatgacttttctcccccagctaagttacatcgcgcaatttcgatt

SEQ ID NO: 30389 - DNA, 61 bp, Unknown
  Description of Unknown: RightRegion for integrase B4390 sequence
tgttggactcgaaccaacgaccctgcggttaacagccgcatgctctaccgactgagctaag

SEQ ID NO: 30390 - DNA, 260 bp, Unknown
  Description of Unknown: RightRegion for integrase B4391 sequence
gctaaaatgttcgttttgactcctgatagctccaccaaaaaagcactgtacttcgtttgaagtatggtgcttttctttttgatttcttggaggctacggaaaaaatcagtcaaaagtctgattttgcaggcgcatggacggcaacccccaattcttgctgtttcgttgtttttgaaaatacttgttcgatgcccgactgttttgcaggcggacgtatcactccccctcgatgtacggagtaaggtcgaagttgaacgaga

SEQ ID NO: 30391 - DNA, 260 bp, Unknown; identical to SEQ ID NO: 30381
  Description of Unknown: RightRegion for integrase B4392 sequence

SEQ ID NO: 30392 - DNA, 260 bp, Unknown
  Description of Unknown: RightRegion for integrase B4393 sequence
acttatgggcatggtgatgttatcaattttacacttgatatttatcccaaactgcagtaattgtactaaaataaagcggtacaattactgctttattttttgcatataagaatagagataacctctacgtgctaatgtatatgctcatagaggttatcgttatttttattctctttatttttacagctcttttaataatgccgcaaatcctgcttccttcagccgtttttccatctcagctgcatcttcctttgtggcat

SEQ ID NO: 30393 - DNA, 260 bp, Unknown
  Description of Unknown: RightRegion for integrase B4394 sequence
aaagccggcattggtcggtacgtggagaacgtgtttgatcttgatatagagttgttataattcatttccaacatcgcggtgcagattcctctgtgccaatatcggtcagcagccccgccaccttccgatccggcatgctgtagcgctgcgacaggtaacgaaacgatgctgccgcttctccgtccgggccgccgtactgcgacaaaatgatctgcgcgatcttcgcattggggcttgtgatgttgaccgggtactgcagg

SEQ ID NO: 30394 - DNA, 260 bp, Unknown
  Description of Unknown: RightRegion for integrase B4395 sequence
attgaatattttacttatgatagccaaacaaatgaaattggttataaattaaggctgtagttattcctacagcctttttattaaagtggacataggttgtaaattagattttattgcatctgcaccttgtccagttgataagtctattgcaagtccttcttcttcaaagaaaccttcatttattgcaacatacattggtgcataaaatacagatcttacaacttcatttaatcttatggtttttaaatttgtactttcag

SEQ ID NO: 30395 - DNA, 260 bp, Unknown
  Description of Unknown: RightRegion for integrase B4396 sequence
gctaaaatgttcgttttgactcctgatagctccaccaaaaaagcactgtacttcgtttgaagtgcggtgcttttctttttatatagacgcagaaaaaggaggggacttcccacaaaagggaaagtcaccgcctttgatgatcatcggatgagccagccgtaatcctgtctgcaatctaccacatgatccgcataaaccgtatgatctacaatctggaagataagcatatagcgtttttcaaacaagatgaatcggtaagc

SEQ ID NO: 30396 - DNA, 260 bp, Unknown
  Description of Unknown: RightRegion for integrase B4397 sequence
acctatgggcatagtgatgatatcaattttacactagatatctatcctaaattgcaataatatcatcattttgcccatgtaaatgggtgtaaaaagatagggataatctctacgtgccaatatgttggcccatagaggctatcatcaatttaaaaaaagaaattcccgggaaattaaccccgggatactttttactgtttcttgatatattttgcagatacaaagccataatactttcctgcaatacggatataatacca

SEQ ID NO: 30397 - DNA, 260 bp, Unknown
  Description of Unknown: RightRegion for integrase B4398 sequence
cgaggttatgaattagagattatattcgaccttaattatgaacaattcttatctctataaagacttatagattgaatttacaaatttattctgctataatattttcagcttagaagtgggtgaatatatatgagcgaagaaaataagatacaaatttttgaagataaaaagattcgtactgcgtggaatgagtcggaagaagaatggtatttttctatagttgatgtaatttcagttctgactgacagtaacgaacctcg

SEQ ID NO: 30398 - DNA, 260 bp, Unknown
  Description of Unknown: RightRegion for integrase B4399 sequence
attgagtattttacctatgacagcgaaacaaatgaagttggatataaactaaggttgtaggtagatctacagcctttcatgtattatggacatatgttgttatttagattgtgttgcatctgcaccttgtccagttgataaatcaatctctagcccttcttcttcaaaaaaaccctctgtaattgctacatacatgggtgtataaaaaacagatctaacaacttcgtttaatcttacaatttgtaattcaacatcacttc

SEQ ID NO: 30399 - DNA, 260 bp, Unknown
  Description of Unknown: RightRegion for integrase B4400 sequence
aagtattggatgaacacctactttttcagcggcggatttgccgtcagatgtgttctctgatacaaaaacagaacgccgtttcagtgtaaaagctgaagcggcgtttttctgtctttaaaagattttttatccacatattcgatttttgggtaagctccgtttataatgaaatcatcaaaatgaaacggaggtagcagaatgagaaatccgagatatcacttatatttatcacccgatgaacggcgtacagtcatcaacag

SEQ ID NO: 30400 - DNA, 120 bp, Unknown
  Description of Unknown: RightRegion for integrase B4401 sequence
attgagtattttacctatgacagcgaaacaaatgaagttggatataaactaaggttgtaggtagctctacagcctttcatttattatggacatatgttgttatttagattgtgttgcatc

SEQ ID NO: 30401 - DNA, 260 bp, Unknown
  Description of Unknown: RightRegion for integrase B4402 sequence
tacgaactcttttggtttaagaacgtgttcggcctgacaagaaagctgccgcagaggtaattgtcctctgcggcagctttcttattcgccggtgtagccctcacaccgcgcgttgctcataagtagccgtgatttctctttttcgcttcaatgtttgacagcacatcccggatttcaaaggcacctatcgcacagttccagtgatcgcacccaaacgagcggaagatgcagttttggcacccgtcctgctgcttgcagta

SEQ ID NO: 30402 - DNA, 260 bp, Unknown
  Description of Unknown: RightRegion for integrase B4403 sequence
gagtcttgcatgactttcctattatatcatggatgcgcgatatttcaactggcggcgtaaaaattccccctgccgatgtggcagggggtcttgttatttgcggacgatatagcgcatgtagcgctcgaccttgtccggctgtgcgtccgcgtcacggatgaagtcggcggccatgtccgcgtagaaatccgggctgtggatgccgtagcgcttggccgtggcggcgtagtcgctgtacatggcgttggccaccgcgtaga

SEQ ID NO: 30403 - DNA, 260 bp, Unknown
  Description of Unknown: RightRegion for integrase B4404 sequence
tttcgtacggggccgggttcccgcacgggtcaccaagaagcactacttcatttgaggtagtgcttttttctttgtatccgctttttaataggtgtcgggcgtaaaaggtgacccgtgtgggaatcgaaaagcccgggccccgcgtccagcgtaccgcggggcaaaaacagccccgcgggctgtttttagggcgcgggagattccgcgcgggcggaagctgatgtggccggggtggttggcgtgggatgttgttgtttaag

SEQ ID NO: 30404 - DNA, 109 bp, Unknown; identical to SEQ ID NO: 30384
  Description of Unknown: RightRegion for integrase B4405 sequence

SEQ ID NO: 30405 - DNA, 260 bp, Unknown
  Description of Unknown: RightRegion for integrase B4406 sequence
acttatgggcatggtgacgttatcaattttacacttgatatttatcccaaactgcagtaattgtactaaaataaagcggtataattactgctttattttttcatataaaaatagagataacctctacgtgctaatgtatatgctcatagaggttatcgttatttttattctctttatttttacagctcttttaataatgccgcaaatcctgcttccttcagccgtttttccatctcagctgcatcttcctttgtggcata

SEQ ID NO: 30406 - DNA, 260 bp, Unknown; identical to SEQ ID NO: 30376
  Description of Unknown: RightRegion for integrase B4407 sequence

SEQ ID NO: 30407 - DNA, 260 bp, Unknown; identical to SEQ ID NO: 30386
  Description of Unknown: RightRegion for integrase B4408 sequence

SEQ ID NO: 30408 - DNA, 260 bp, Unknown
  Description of Unknown: RightRegion for integrase B4409 sequence
ggagataaggataatcctacttttacactgaatttaaagccccgaatcccgcgtatttaggggctttttcattagcgacaacatttatgggcgcaagaactagctcacttagaaatcgtctgtgctattgtttatcaacttacaaaaaatatgacaatggaagaattagagaaatccggttttgataaatattatatagatcatacgcttgcactctggccacagtctgccggcggtgttccttggagcgccactacttt

SEQ ID NO: 30409 - DNA, 260 bp, Unknown
  Description of Unknown: RightRegion for integrase B4410 sequence
attgaatattttacttatgatagtgaaactaatgaggttggttataaaataaggttgtagctaactctacagcctttcatttattatggacatatgttgttatttagattgtgttgcatcggcaccttgtcctgtagataaatcaatattaagtccttcttcttcaaaaaagccttcatttattgcaacatacattggagcataaaatacagatcttacaacttcatttaatctaacagtttgtaaatttgcttcatcag

SEQ ID NO: 30410 - DNA, 131 bp, Unknown
  Description of Unknown: RightRegion for integrase B4411 sequence
gctaaaatgttcgttttgactcctgatagctccaccaaaaaagcaccatacttcatgtgaggtatggtgcttttctttttgatttcttagaggttgcatcgagaatcagccaaatgcctgattttgcaggc

SEQ ID NO: 30411 - DNA, 123 bp, Unknown
  Description of Unknown: RightRegion for integrase B4412 sequence
attgaatattttacttatgatagccaaacaaatgaaattggttataaattaaggctgtagttattcctacagcctttttattaaagtggacatatgttgtaaattagattttattgcatctgc

SEQ ID NO: 30412 - DNA, 260 bp, Unknown; identical to SEQ ID NO: 30385
  Description of Unknown: RightRegion for integrase B4413 sequence

SEQ ID NO: 30413 - DNA, 260 bp, Unknown
  Description of Unknown: RightRegion for integrase B4414 sequence
agtatcgtatttagcagggaaaataatacagagttcatactggatataactttacgataaccttatactattatagtgtaaggattactttttacccatgatgtgtatcatagatgggcatcttttatagctccaccatgatacacgtcacagggtttatgggaggaaatataaatgagagtagtatggaaagatagcgcaccgaagactaagccatggatcgaattgaagtataggaattataccataagtcagtatgg

SEQ ID NO: 30414 - DNA, 260 bp, Unknown
  Description of Unknown: RightRegion for integrase B4415 sequence
attgaatattttacttatgatagccaagcaaatgaaattggttataaattaaggctgtagttactcctacagcctttttattaaagtggacatatgttgtaaattggattttattgcatctgcaccttgtccagttgataagtctattgcaagtccttcttcttcaaagaaaccttcatttattgcaacatacattggtgcataaaatacagatcttacaacttcatttaatcttatggtttttaaatttgtactttcag

SEQ ID NO: 30415 - DNA, 260 bp, Unknown
  Description of Unknown: RightRegion for integrase B4416 sequence
attgaatattttacttatgatagccaaacaaatgaaattggttataaattaaggctgtagttactcctacagcctttttattaaagtggacatatgttgtaaattggattttattgcatctgcaccttgtccagttgataagtctattgcaagtccttcttcttcaaagaaaccttcatttattgcaacatacattggtgcataaaatacagatcttacaacttcatttaatcttatggtttttaaatttgtactttcag

SEQ ID NO: 30416 - DNA, 260 bp, Unknown
  Description of Unknown: RightRegion for integrase B4417 sequence
agaggttatgaacttgagatagtgtttgatcttaattatgagcagtttttatctaaataaatcttaatcaattgaatttacaaatcttgtctgttataataattttagtattgaaatgggtgaagatatatgagtgaagaaaataaaattcaaatttttgaagataagaaaattcgtactgcatggaatgaatcggaagaagattggtatttttccatagttgatattgttcaggtgttaactgatcaacccagttacga

SEQ ID NO: 30417 - DNA, 260 bp, Unknown
  Description of Unknown: RightRegion for integrase B4418 sequence
ggcttggacggttcggatttgaattgttgtggtgtaccaaaagtcctcgaaatcgtctgatttcgaggacttttgcttttcgtaagttgccgttttgggatactgctttttcctgacccacaccgtgacccacatcggctgttaaactgtacccaagaaaatggacacgagattttgacccatggccccgttcggcggacacgcatttgacccatagggtcagaagcgccgcacctgtgttacgcaaagggcgttcgcgg

SEQ ID NO: 30418 - DNA, 260 bp, Unknown
  Description of Unknown: RightRegion for integrase B4419 sequence
ttaagctccgcaagcagccaccaaaagaggaagcgtcgaactcttcttttacaagaatgagtttgcgcttgtgtataggttgggggacgcctgatggcgtcccctttccgtttccgttgccacgaaacgccgtattttgcgttttaagacgttttaagcccgttggggtactcgtgtacccctcgggcttttttcgtgccttaaaacggctctgaagcggtctgaggacgttcgagcgcccatgtgcatctcgcgttcgc

SEQ ID NO: 30419 - DNA, 260 bp, Unknown
  Description of Unknown: RightRegion for integrase B4420 sequence
cgaggttatgaattagagattatattcgaccttaattatgaacaattcttatctctataaagcctaatagattgaatttacaaatttattctgctataatattttcagcttagaagtgggtgaatatatatgagcgaagaaaataagatgcaaatttttgaagataaaaagattcgtactgcgtggaatgagtcggaagaagaatggtatttttccatagttgatgtaatttcagttctgactgacagtaacgaacctcg

SEQ ID NO: 30420 - DNA, 260 bp, Unknown
  Description of Unknown: RightRegion for integrase B4421 sequence
attgaatattttacttatgatagcaaaacaaataaaattgaatataaaataaagctatagataattctatagcttatataatatgtatatgtattgttgttttgaatgggttgtatcagctacactttcaaaacaacaataatattttttaatacttaatagaatttttaaaggttctaatttactgctttatagttgcaaaataatttacttaaagtaaaaagctagataccaacttattagtacctagctttttaatc

SEQ ID NO: 30421 - DNA, 260 bp, Unknown
  Description of Unknown: RightRegion for integrase B4422 sequence
gctaaaatgttcgttttgactcctgatagctccaccaaaaaggcactgtacttcgtttgaagtacggtacttttcttttttctttcttagaggttgcatcgagaatcagccaaatgcctgattttgcaggcggacagattactccccctcgatgtatggggtgaagccgaagttgaacgagatgctgatctgatagcgtttcatgataagcgtttttttcgggatgcaaaaaaaatagccgtcagcttcaaagacctctt

SEQ ID NO: 30422 - DNA, 109 bp, Unknown; identical to SEQ ID NO: 30384
  Description of Unknown: RightRegion for integrase B4423 sequence

SEQ ID NO: 30423 - DNA, 260 bp, Unknown
  Description of Unknown: RightRegion for integrase B4424 sequence
aaagctggcattggtcggtacgtggagaatgtgtttgatcttgatatagagctgttatagttcatctccaacatcgaggtgcagattcctctgtgccaatatcggtcagcagccccgccaccttccgatccggcatgctgtagcgctgcgacaggtaacgaaacgatgctgccgcttctccgtccgggccgccgtactgcgacaaaatgatctgcgcgatcttcgcattggggcttgtgatgttgaccgggtactgcagg

SEQ ID NO: 30424 - DNA, 109 bp, Unknown
  Description of Unknown: RightRegion for integrase B4425 sequence
gaaggcgctgtcagtggtgacggttgcaaaggttcagcttttgcgccgtcaagcgcatgaaaaaagccttgatgatatcagggcttttttgctgttacaaagtattcgt

SEQ ID NO: 30425 - DNA, 260 bp, Unknown
  Description of Unknown: RightRegion for integrase B4426 sequence
aaagctggcattggtcggtacgtggagaacgtgtttgatcttgatatagagctgttatagttcatctccaacatcgaggtacagattcctctgtgccaatatcggtcagcagccccgccaccttccgatccggcatgctgtagcgctgcgacaggtaacgaaacgatgctgccgcttctccgtccgggccgccgtactgcgacaaaatgatctgcgcgatcttcgcattggggcttgtgatgttgaccgggtactgcagg

SEQ ID NO: 30426 - DNA, 260 bp, Unknown
  Description of Unknown: RightRegion for integrase B4427 sequence
cgcatcgatgagaaaagcagcacggtagtcttccgaggtgggattgagattacaatttaatatgaagaaacacgaatcgaaaggggcatctggcagcttggctggatgcccctttctttatgtactgatattgagtgctgtatgatatgttgatggcaaatacatttaccagcggtatcagattttgaggatattgcgaagctgcaaatatagtttatcacagatgccggaggtttttcctgtaatggcgtagatcttct

SEQ ID NO: 30427 - DNA, 260 bp, Unknown
  Description of Unknown: RightRegion for integrase B4428 sequence
gcggcccccgcccatggtgagggggttctactattgccgcatcatctccaccagaattagtccaatcgtgacagttgattggtggaataaaaagcagaggatagtgtgtgacagcactattctctgtttttgtttgcaagctgtttagtgtgtgtaagctgcttgcctataacagcacgaggataatgtactttcgcggtacgttatcctcttttttgtttttaggatgaatttaagcataggtgatgcaaaatttttat

SEQ ID NO: 30428 - DNA, 260 bp, Unknown
  Description of Unknown: RightRegion for integrase B4429 sequence
tattacgtggcatggcgcacggtcgtcatagtcacgaaatacaggaagaccccctgctagggggtcttcctcttttctggccaaatgaaaagccccactagcgcgggcgctagtggggccaaaccgtgaaggtttcacatcgcggccattatagcattccgctacaccttcgaagcgtatgcggctccctggtacctgatggcgaaccagccgtccgaggtcttgccccacaggtttccgtcctcgctcgctgtctgcgt

SEQ ID NO: 30429 - DNA, 260 bp, Unknown
  Description of Unknown: RightRegion for integrase B4430 sequence
gccaaaatgttcgttttgactcctgattgctccaccaaaaaagcactgtacttcgtttgaagtatggtgcttttctttttgatttcttggaggctacggaaaaaatcagtcaaaagtctgattttgcaggcgcatggacggcaacccccaattcttgctgtttcgttgtttttgaaaatacttgttcgatgcccgactgttttgcaggcggacgtatcactccccctcgatgtacggagtaaggtcgaagttgaacgaga

SEQ ID NO: 30430 - DNA, 109 bp, Unknown
  Description of Unknown: RightRegion for integrase B4431 sequence
tcaggacacggaagatggattgaaaacaagtttaaacttgaaatttttttacgtttataatttccaacatttatgtaccaatgaattggcgcacctcgagatgattgcc

SEQ ID NO: 30431 - DNA, 260 bp, Unknown
  Description of Unknown: RightRegion for integrase B4432 sequence
tcgcaagggatcattccgggaacgatgcaggtaccgaagaactatcccatctcgaaatgataggctctatagtatcccagctcacaacaggcgagggcgcaaagagctttgaccgatacggagtaggcgcatattatatggatcacgcaaatgcggtttacccatccaatgccggcggtgtgccgtttaccgccgcatacatccagagcaaagccgatccgctcgccgatattcacgaagatcttgcggcggagcagaaa

SEQ ID NO: 30432 - DNA, 260 bp, Unknown
  Description of Unknown: RightRegion for integrase B4433 sequence
ggagataaggataatcctacttttacactgaatttaaagccccgaatcccgcgtatttaggggctttttcattagcgacaacatttatgggcgcaagaacacgcccaaaaacgttctcgcttatttttcttccttattataatgcgtttttacagcgtttctgcgtatttactggatatcttaatccagccctcgccggactttaatctgccatacggcatcttctccacggtcctcgtttccgtgatcgtatagaccga

SEQ ID NO: 30433 - DNA, 73 bp, Unknown
  Description of Unknown: RightRegion for integrase B4434 sequence
gaaagttcgaccgagaagcgtttggtccgagtggcgagaatcgaactcacggcctcttgaaccccattcaagc

SEQ ID NO: 30434 - DNA, 260 bp, Unknown
  Description of Unknown: RightRegion for integrase B4435 sequence
cgaggctatgaattagagattatattcgaccttaattatgaacaattcttatctctataaagcctaatagattgaatttacaaatttattctgctataatattttcagcttagaagtgggtgaatatatatgagcgaagaaaataagatacaaatttttgaagataaaaagattcgtactgcgtggaatgagtcggaagaagaatggtatttttccatagttgatgtaatttcagttctgactgacagtaacgaacctcg

SEQ ID NO: 30435 - DNA, 260 bp, Unknown
  Description of Unknown: RightRegion for integrase B4436 sequence
gagggttcgcctttggactcgtctgctccattaaaactgaaccagtcgaactctgtataggatcttatcgtatacagaaatcggttttgtttggtgtattgaagaaaataggaattctctaaaagaaaattcgtacatagattattattatcatggatcaattgagattttgataaaattatttgaatgataaaatggaaatgtaaggaatgtgtcagattatactgcatcagacataaaggcaattctaccatgtgaat

SEQ ID NO: 30436 - DNA, 260 bp, Unknown; identical to SEQ ID NO: 30399
  Description of Unknown: RightRegion for integrase B4437 sequence

SEQ ID NO: 30437 - DNA, 260 bp, Unknown
  Description of Unknown: RightRegion for integrase B4438 sequence
aaagaccttgaaccaaagttcaaaggcactcgaaatacgcttgtttatattgaaatatgatgaaaaataggctcaaaagtgttctaacgaggttaagcaaacgcatcaacttttttcgccacatctgctataatgccgttcgtcgaagtaaacgtatagagtaataaacgagctgtgccgtttgtcgtccgcgttaaatcatcgcctggatctatcgtcggatatcccgcagtgtcatatatggattttatttcagccgt

SEQ ID NO: 30438 - DNA, 260 bp, Unknown
  Description of Unknown: RightRegion for integrase B4439 sequence
gatagagaaaaagttcgcgcaagttctccatcggtcaaccagaacaaagccatccgatgaacgatcgggtggcttttctgttttgttttctgccgatttcacgcagtgaacacaccgcactgtaccaaaggtctttgggcaaatcaaacacccgcaccgcattcccttttcttgggagatgcagtgcgggtgcttttttcgtttgtcaaccagcgggctgaatcatcttacaggatgctgatgcggcctgcaccgtaggg

SEQ ID NO: 30439 - DNA, 260 bp, Unknown
  Description of Unknown: RightRegion for integrase B4440 sequence
gagtcttgcatgactttcctattatatcatggttgcgcgatatttcaactggcggcgtaaaaattccccctgccgatgtggcagggggtcttgttatttgcggacgatatagcgcagatagcgctcgaccttgtccggctgtgcgtccgcgtcccgaatgaagtcggcggccatgtccgcgtagaaatccgggctgtggatgccgtagcgctttgccgtggcggcgtaatcgctgtacatggcgttggccaccgcgtaga

SEQ ID NO: 30440 - DNA, 260 bp, Unknown
  Description of Unknown: RightRegion for integrase B4441 sequence
ccaccagtaacacgaatactgcttttgcggtgttcgtgttatttttatacccacgcctgatttcctaatcttcgtttaatctttacacgctatgataaaatctgtataattataccggaaggtgatccaatgcgtattctgcttgccgaggacgagaagagtctcaacaggataatcacaaagcagctcaaggctgccggctacagcgtggacagctgttttgacggcggcgaggcatatgatctgataacatcgaccga

SEQ ID NO: 30441 - DNA, 172 bp, Unknown
  Description of Unknown: RightRegion for integrase B4442 sequence
attgaatattttacttatgatagccaagcaaatgaaattggttataaattaaggctgtagttactcctacagcctttttattaaagtggacatatgttgtaaattggattttattgcatctgcaaataacgtaaaataacaacatttgtccacttattttattattaattat

SEQ ID NO: 30442 - DNA, 109 bp, Unknown
  Description of Unknown: RightRegion for integrase B4443 sequence
tcaggacacggaagatggattgaaaacaagtttaaacttgaaatttttttacgtttataatttccaacatttatgtaccaatgaattggcacatctcgaaatgattgcc

SEQ ID NO: 30443 - DNA, 260 bp, Unknown; identical to SEQ ID NO: 30435
  Description of Unknown: RightRegion for integrase B4444 sequence

SEQ ID NO: 30444 - DNA, 260 bp, Unknown; identical to SEQ ID NO: 30415
  Description of Unknown: RightRegion for integrase B4445 sequence

SEQ ID NO: 30445 - DNA, 260 bp, Unknown
  Description of Unknown: RightRegion for integrase B4446 sequence
aaagaaatcgtctttgaactgaagtgtggactgaaattaaaggaaaggttggtgggataatggcacatataccctacggatataagattataaatggaaaagcagaggttgatgaaaaacaggctgaggtagtcataaagctgtttgatggctacattgcaggacttggattaaagcctgcggcagagaatgcgggtcttgatatttatcatggcagtgcaggcagaatgctgcgaaacacgcattaccttggagatgaa

SEQ ID NO: 30446 - DNA, 260 bp, Unknown
  Description of Unknown: RightRegion for integrase B4447 sequence
gctaaaatgttcgttttgactcctgatagctccaccaaaaaagcaccgtacttcgtttgaagtacggtgcttttctttttgctttcttagaggttgcatcgagaatcagccaaatgcctgattttgcaggcgcatggacggcaacccccaattcttgctatttcgttgcttttgaaaatgcttgttcgatgtccgactgttttgcaggtggacgcatcactccccctcaatgtaaggagtgagagcgaagctgtttgaga

SEQ ID NO: 30447 - DNA, 260 bp, Unknown
  Description of Unknown: RightRegion for integrase B4448 sequence
acaaagattgtgttccacctaaaatgcggattgaatctaacggaaaggttggtgaactaaatggcagcacataccccatatggatatcgcattgtagacggaaaggctgttgtcgatgaggtacaggcggaacaggtcagaagcttttttgaagagtacatttccggtaaggcactaaaggttgctgcagaaaatgtggggctaaagatttttcacggcagtgccggaaggatgcttcgaaatacccgttatcttgggga

SEQ ID NO: 30448 - DNA, 164 bp, Unknown
  Description of Unknown: RightRegion for integrase B4449 sequence
gacttggagggttcggatttgaacggttgtggcgtaccaaaagtcctcgaaatcgtctgatttcgaggacttttgcttttcataagtcccgttttttgtgtgccgcctttttctgacccaaacgctgaccccaacgggagcgggtagcggaaaccatcagacgg

SEQ ID NO: 30449 - DNA, 260 bp, Unknown
  Description of Unknown: RightRegion for integrase B4450 sequence
acctgcattgtaagggtatcgaaaaactggtttgttgtcgttggaacgtgccagaaatagccatttccggtgtttgcaaaataccagatgggcggcttgctgtaagcccgtctaacgccagaaagcggggcaccctgacaaggggtgccccgcttgaacgctaataagaaagcttctggccggggtagatcgtataaggtgccccaatgccgttcttgcttgcgatggtgtgccagtcgatgccgagcgaagcgccaatc

SEQ ID NO: 30450 - DNA, 260 bp, Unknown
  Description of Unknown: RightRegion for integrase B4451 sequence
agaagagaagtagagtttgaattaaaattcggcttaaagctgaaggaaaggattgattaaaatggcacacataccagtagggtacaaaatagttgacggttgtgctgtagttgatgaaacggctgcagaacaaataagggcaacctacagatactattttgaaggcaagtcacttattgatgcagctaaagaagcaggttttaagatgaaccatgcatcagtaaagagaatgctttctaacaagaagtatctgggaacag

SEQ ID NO: 30451 - DNA, 260 bp, Unknown
  Description of Unknown: RightRegion for integrase B4452 sequence
ttattcgatgaattgataagggaagaggatacaataagagttgaaaagcaaactatttaaatagttacttttgtatttaataatacctggagttcacgcttcacatggtatggagagaactcactatgatgctttagaaaacaccataaaactaatatatttgtatttaacaagataaaataagaaaaataattaataaatttgagtcatctaaaagtaaaaaacacttttaggtgactttttttagattattatataac

SEQ ID NO: 30452 - DNA, 260 bp, Unknown; identical to SEQ ID NO: 30399
  Description of Unknown: RightRegion for integrase B4453 sequence

SEQ ID NO: 30453 - DNA, 109 bp, Unknown
  Description of Unknown: RightRegion for integrase B4454 sequence
caacaaaaaaactccgaacgcataagcgttcgaagttgttcttcttggctccccgagtaggactcgaacctacgacgccctgattaacagtcaggtgttctaccggctg

SEQ ID NO: 30454 - DNA, 260 bp, Unknown
  Description of Unknown: RightRegion for integrase B4455 sequence
aaaaagttcgcacaaggtcacgtcacctccaccagtaaaaaaagccacctgaaaacgtaagttttcgggtggcttttgctatacggagcgatgttgtattgttacgccagatccggtaggatatccgaccacagagcctgctcctgccgcaaagcatcgaagcagcagtccagatacattttattgactgccgcaaaaatggtgctgcgcagcaacagacgctcgtcgttgagcgtagcctccggctgggtggccttgcc

SEQ ID NO: 30455 - DNA, 109 bp, Unknown
  Description of Unknown: RightRegion for integrase B4456 sequence
ccaggaataggtcgatatgttgataatccctttagattagagattttcctgaaactgtaaacccgcagtttcagggaattttcaaccacatacaacatcaatgttctaa

SEQ ID NO: 30456 - DNA, 260 bp, Unknown
  Description of Unknown: RightRegion for integrase B4457 sequence
attgaatatagcagggataataatacagaatttatattagacgttttcctgaaggattaaatgtctatatctaactcaattgggcagtgatcggaacccatgacatcggttaagatctccgcatctttgatcttatctttgatagaatctgatgttaagaaataatcgatacgccatccggcattcctttctcttgccttaaatcgatagctccaccatgaatacttctctgtatctgggtgtaaatatcgataagaatc

SEQ ID NO: 30457 - DNA, 260 bp, Unknown
  Description of Unknown: RightRegion for integrase B4458 sequence
aacatgcgtttgtttatgtattcagattacttctctgtccgtattcgacgcattgcttaattactggtctgcaggtatcattttagacaacagtttatcgaccatccacagtacaacagaaattaaagtaggaaggaatgcggaatcacgaaacttattccaaccagtctctttttcagcatccgcttttagtgctgtagtataagaatcagctatctcctttactgcaggaagtgcagtatcttttaaccaggcaacag

SEQ ID NO: 30458 - DNA, 260 bp, Unknown
  Description of Unknown: RightRegion for integrase B4459 sequence
tccctagtaaaagacgattcttttgacttagaaatattccctattctacctagaaaatagccttttctttaatataggtatcgtcttgttccatattcataggggctataacgatacctatatttcatttagttacctactttcttaaataatgcaactattttataacaggattagtctgctttcaagtgctttattttttcagataagttcttgttgtcgagccggccaatccgtcggcagtgattccacacgcttct

SEQ ID NO: 30459 - DNA, 260 bp, Unknown
  Description of Unknown: RightRegion for integrase B4460 sequence
ccgggaataggtcgatatgttgataatccctttagattagagattttcctgaaactgtaaacccgcagtttcaggggattttcaaccacatacaacatcaatgttctaattcttccgtgcctatatcagtcagcaatccggcaacctccctgtatggcatggaatatctctgtgaaagatatctcattgatgctccaagctcgccatctggtccaccatactgcgaaataatcattgctgccagcgtaggattacaattc

SEQ ID NO: 30460 - DNA, 260 bp, Unknown
  Description of Unknown: RightRegion for integrase B4461 sequence
aaccttgaaatacggatcgggaaaggctggttctccatcgtctatcctattgcagcataaaaaatcggggacaacattagaaaatgttatccccgcaaagcagttccctgcttttccttggcttattaaataaaggcggagacggcctacacaccgcagtgtgttgttctagaaatctccacctcgctcccggcaaaggagtgctcagctctaatgcctaccccattctgggacccagccgggaaccactatagtaatat

SEQ ID NO: 30461 - DNA, 109 bp, Unknown
  Description of Unknown: RightRegion for integrase B4462 sequence
ccgggaataggtcgatatgttgataatccctttagattagagattttcttgaaactgtaaatccgcagtttcaggggattttcaaccacatacaacatcaatgttctaa

SEQ ID NO: 30462 - DNA, 260 bp, Unknown
  Description of Unknown: RightRegion for integrase B4463 sequence
cggaacgctatggcctgccacagagcactgattttcatcagtgctcattttttgttttaattaattttaataataattttgtgataattgtgatataatataattaaaaatcctaaaatttgttatttattttaattgacctttttcgtcaataatagtataatttgatacagtaaaatatgaatatatggaggcaaacataatgaaaaaagttttagctattactttatcacttgtatttgtattatttgcatttgcag

SEQ ID NO: 30463 - DNA, 260 bp, Unknown
  Description of Unknown: RightRegion for integrase B4464 sequence
tcacgacaaaaaataggatttgttctgagatgtggccttacatttgaggagatgatttaatgggacacacgccatttggatatataatcgttgacggaaaggctgttgttgacgaagccactgccgaacaggttcgcaatgtctatttgaattaccttagcggactttctcttgtcgatgcggcaaagagggtaggacttaatatgcgacattgcggagtgaagaatatgctgcaaaacaagcactatcttggcgattac

SEQ ID NO: 30464 - DNA, 260 bp, Unknown
  Description of Unknown: RightRegion for integrase B4465 sequence
gctcctgataaagttgacgattttgaattagaatttatctctaaattacctagtaaataagccttttttttattttttatattatgctgacctcatataaacacagacctcaatgaagacctcgctgccgaacagaaagccagaacaacttatgaataccttatgaaaatgacagacgaccctgatgtattagagccattaaagttccttagagaacgtgaaattgttcattatcagagatttggtgaggcccttagaat

SEQ ID NO: 30465 - DNA, 173 bp, Unknown
  Description of Unknown: RightRegion for integrase B4466 sequence
cacaaagattatatcgtagtccttcatgttgtcccgtttcacggcaatttccggtcgtgaggcgggattgttcatttcaatcgtactgcgggctttcttgtccatccagttcaaatccacttccgtgtaaggcaccttcggctcaatctcaaagatgtccgcgccgattgcct

SEQ ID NO: 30466 - DNA, 260 bp, Unknown
  Description of Unknown: RightRegion for integrase B4467 sequence
gattacaccatcaccaagagcataggtcggacattcctgccgacaccggaattacagtaggaaatatgacaccggatataaacaacaacgcctgactgcaaccatgcaatcaggcgttctctcttgctcggaactagaagttcgagcccttcgtggtcgagatgacaggattcgaacctgcgacctctgcgtcccgaaagtagtacaaaaatcccattacattcgattataaagcaccttttaaatcttttgtgacaccc

SEQ ID NO: 30467 - DNA, 260 bp, Unknown
  Description of Unknown: RightRegion for integrase B4468 sequence
ccgggaataggtcgatatgttgataatccctttagattagagattttcctgaaactgtaaacccgcagtttcaggggattttcaaccacatacaacatcaatgttctaattcttccgtgcctatatcagtcagcaatccggcaacctccctgtatggcatggaatatctctgtgaaagatatctcattgatgctccaagctcaccatctggtccaccatactgcgaaataatcattgccgccagtgtaggattacaattc

SEQ ID NO: 30468 - DNA, 260 bp, Unknown
  Description of Unknown: RightRegion for integrase B4469 sequence
aataaacgttctaatgcatatactaaaccagttcttaaaatacgtataattttacgctaattttaaatgtattataaaaagttgtatcggcgttcaaatcgaagcattgattgattatgttcacctcttttatcaagaaaacacagcagaagctcgcaaagctattttagtagaacaacgtgatcgtctccagaaacaaattgataccatgaatttagttattgaacgcttaaataaaaaagtagaccgttatgaagaaa

SEQ ID NO: 30469 - DNA, 260 bp, Unknown
  Description of Unknown: RightRegion for integrase B4470 sequence
aataaacgttctaatgcatatactaaaccagttcttaaaatacgtataattttacgctaattttaaatgtattataaaaagttgtatcggcgttcaaatcgaagcattgattgattatgttcacctcttttatcaagaaaatacagcagaagctcgcaaagatatcttaattgaacaacgcgaccgcttacaaaaacaaattgataccatgaatttagttattgagcgcttaaataaaaaagtagatcgttatgaagaaa

SEQ ID NO: 30470 - DNA, 260 bp, Unknown
  Description of Unknown: RightRegion for integrase B4471 sequence
tacggtgttgaaattgtgtttcgcagcgttataaaggaactatgccaaatgaaagtgtaaaagaaaagcgctcatgccgaagtcatccttccaggcatgagcgcttttcttgcggttgtaaagttttttgctttcgaccttcttgggcgtgggggagaaggcccagacggtgcgcttctggctgtccagctcttttcgggctttcttgctgagcttttcgcgggagatgaattttgccatgaggttcacatcctttcaag

SEQ ID NO: 30471 - DNA, 260 bp, Unknown
  Description of Unknown: RightRegion for integrase B4472 sequence
aataaacgttctaatgcatatactaaaccagttcttaaaatacgtataattttacgctaattttaaatgtattataaaaagttgtatcggcgttcaaatcgaagcattgattgattatgttcacctcttttatcaagaaaacacagcagaagctcgcaaagatatcttaattgaacagcgcgaccgcctacaaaaacaaattgacgctatgaatatagtaattgaacgtttaaataaaaaagtagaccgttatgaagaaa

SEQ ID NO: 30472 - DNA, 260 bp, Unknown
  Description of Unknown: RightRegion for integrase B4473 sequence
ccaggaataggtcgatatgttgacaatccctttagattagagattttcctgaaactgtaaacccgcagtttcaggggattttcaaccacatacaacatcaatgttctaattcttccgtgcctatatcagtcagcaatccggcaacctccctgtatggcatggaatatctctgtgaaaggtatctcattgatgctccaagctcaccatctggtccaccatactgcgaaataatcattgctgccagcgtaggattacaattc

SEQ ID NO: 30473 - DNA, 260 bp, Unknown
  Description of Unknown: RightRegion for integrase B4474 sequence
aataaacgttctaatgcatatactaaaccagttcttaaaatacgtataattttacgctaattttaaatgtattataaaaagttgtatcggcgttcaaatcgaagcattgattgattatgttcacctcttttatcaagaaaacacagcagaagctcgcaaagatatcttaattgaacaacgcgaccgcttacaaaaacaaattgatgctatgaatatagtaattgaacgtttaaataaaaaagtagaccgttatgaagaaa

SEQ ID NO: 30474 - DNA, 260 bp, Unknown
  Description of Unknown: RightRegion for integrase B4475 sequence
cacgaggacaggatcacggtcgagttcaaatccggccttgcgatagacgtggatgcgtagcagcacagaagcaataaggcactcggaattttccgggtgtctttttctgcgtgttgtgttgaaaaattcataaacttgtggtataatgaattatcttgtcagtgcaattgtgcttcaccaaaagcgaggtgcattatggtaaaaaatgattttgatatagacgttaaggtcaaatgtctggaggagcgcatcacccaggc

SEQ ID NO: 30475 - DNA, 260 bp, Unknown
  Description of Unknown: RightRegion for integrase B4476 sequence
aataaacgttctaatgcatatactaaaccagttcttaaaatacgtataattttacgctaattttaaatgtattataaaaagttgtatcggcgttcaaatcgaagcattgattgattatgttcacctcttttatcaagaaaacacagcagaagctcgcaaagatatcttaattgaacaacgagaccgcctacaaaaacaaattgatgctatgaatatagtaatagaacgtttaaataaaaaagtagaccgttatgaagaaa

SEQ ID NO: 30476 - DNA, 260 bp, Unknown
  Description of Unknown: RightRegion for integrase B4477 sequence
gccacgaaccgtggctggattgtctgggatatttctgttgacgcaaatttgtgtatataattctatcatcgttgtaccgacgaaccagtacaacgatgattactataatatacacagcaaaggaggcggtttcccgcctccttcttacatctcgtgcaccatctgctccgtttcggcatatcttctctttacgtcttccggtacttcccatccatgattttcgtaaatccgccagagcctcttcgcatgtttcagctctt

SEQ ID NO: 30477 - DNA, 109 bp, Unknown; identical to SEQ ID NO: 30384
  Description of Unknown: RightRegion for integrase B4478 sequence

SEQ ID NO: 30478 - DNA, 260 bp, Unknown; identical to SEQ ID NO: 30471
  Description of Unknown: RightRegion for integrase B4479 sequence

SEQ ID NO: 30479 - DNA, 260 bp, Unknown
  Description of Unknown: RightRegion for integrase B4480 sequence
attgaatatagcagggataataatacagaatttatattagacgttttcctgaaggattaaatgtctatatctaactcaattgggcagtgatcggaacccatgacatcggttaagatctccgcatctttgatcttatctttgatagaatctgatgttaagaaataatcgatacgccatccggcgttcctttctcttgccttaaatcgatagctccaccatgaatacttctctgtatctgggtgtaaatatcgataagaatc

SEQ ID NO: 30480 - DNA, 260 bp, Unknown; identical to SEQ ID NO: 30471
  Description of Unknown: RightRegion for integrase B4481 sequence

SEQ ID NO: 30481 - DNA, 260 bp, Unknown
  Description of Unknown: RightRegion for integrase B4482 sequence
gctcctgataaagttgacgattttgaattagaatttatctctaaattacctagtaaataagcctttttttttattttttatattatgctgacctcatataaacacagacctcaatgaagacctcgctgccgaacagaaagccagaacaacttatgaataccttatgaaaatgacagacgaccctgatgtattagagccattaaagttccttagagaacgtgaaattgttcattatcagagatttggtgaggcccttagaa

SEQ ID NO: 30482 - DNA, 260 bp, Unknown
  Description of Unknown: RightRegion for integrase B4483 sequence
gctcgcagcgttcttaaaaaatgtgtctgggacggagagtcactttttttgactttctgatttcgcctttttattgctatcgggactgcaatgtgtttaaaaaggtgaaaaaagcagggcatcagctctgcttttttgtatcttttactatcaaattttctatgtaatttgatagcgttcttccttcctccgcagcctttttttctgctgcggtttttactgaagggagtaccttcatgtaaatgattgagcttcttttt

SEQ ID NO: 30483 - DNA, 260 bp, Unknown
  Description of Unknown: RightRegion for integrase B4484 sequence
attgaatatagcagggataataatacagaatttatattagacgttttcctgaaggattaaatgtctatatctaattcaattgggcagtgatcggaacccatgacatcggttaagatctccgcatctttgatcttatctttgatagaatcagatgttaagaaataatcgatacgccatccggcgttcctttctcttgccttaaatcgatagctccaccatgaatacttctctgtatctgggtgtaaatatcgataagaatc

SEQ ID NO: 30484 - DNA, 260 bp, Unknown; identical to SEQ ID NO: 30471
  Description of Unknown: RightRegion for integrase B4485 sequence

SEQ ID NO: 30485 - DNA, 260 bp, Unknown
  Description of Unknown: RightRegion for integrase B4486 sequence
aataaacgttctaatgcatatactaaaccagttcttaaaatacgtataattttacgctaattttaaatgtgttataaaaagttgtatcggcgttcaaatcgaagcattgattgattatgttcacctcttttatcaagaaaacacagcagaagctcgcaaagatatcttaattgaacagcgcgaccgcctacaaaaacaaattgacgctatgaatatagtaattgaacgtttaaataaaaaagtagaccgttatgaagaaa

SEQ ID NO: 30486 - DNA, 260 bp, Unknown
  Description of Unknown: RightRegion for integrase B4487 sequence
ccgggaataggtcgatatgttgataatccctttagattagagattttcctgaaactgtaaacccgcagtttcaggggattttcaaccacatacaacatcaatgttctaattcttccgtgcctatatcagtcagcaatccggcaacctccctgtatggcatggaatatctctgtgaaagatatctcattgatgctccaagctcaccatctggtccaccatactgcgaaataatcattgctgccagcgtaggattacaattc

SEQ ID NO: 30487 - DNA, 260 bp, Unknown
  Description of Unknown: RightRegion for integrase B4488 sequence
tcgagaggtcagagagtaatgtttgttaaactctttatcctcggcgataggtcgccttaattcgttatatagagccatttatcgcttttacagttaagagtagtttatgtatgtatggaagcagggcttccgtatgcttacgataatgtaagtgtacggaagccctttttttgttgcccgatgaaaggagaacaacgatgaagaagaaagaatatcccaaaaatctgttatcgcaggtgttcgtaaacggactacccacc

SEQ ID NO: 30488 - DNA, 260 bp, Unknown
  Description of Unknown: RightRegion for integrase B4489 sequence
aataaacgttctaatgcatatactaaaccagttcttaaaatacgtataattttatgctaattttaaatgtattataaaaagttgtatcggcgttcaaatcgaagcattgattgattatgttcacctcttttatcaagaaaacacagcagaagctcgcaaagatatcttaattgaacaacgcgaccgcttacaaaaacaaattgatgctatgaatatagtaatagaacgtttaaataaaaaagtagaccgttatgaagaaa

SEQ ID NO: 30489 - DNA, 260 bp, Unknown
  Description of Unknown: RightRegion for integrase B4490 sequence
gatgccaaaatgttcgttttgactcctgattgctccaccattggctcaaatgagagttaaaaacaccgttgatttcaaatcgaagtcaacggtgtttttatatttgtcagcaagcaagttcatcgctgttctccaaatactgcgcaagatcaaagttgaagtccacatgaatttgatatccacgataaacatctatcctacggacaagctggctaacaatcatcttttttgattcaaagctggcactgtcgtacaggtct

SEQ ID NO: 30490 - DNA, 260 bp, Unknown
  Description of Unknown: RightRegion for integrase B4491 sequence
ccgggaataggtcgatatgttgataatccctttagattagagattttcctgaaactgtaaacccgcagtttcaggggattttcagccacatacaacatcaatgttctaattcttccgtgcctatatcagtcagcaatccggcaacctccctgtatggcatggaatatctctgtgaaagatatctcattgatgctccaagctcaccatctggtccaccatactgtgaaataatcattgctgccagcgtaggattacaattc

SEQ ID NO: 30491 - DNA, 260 bp, Unknown
  Description of Unknown: RightRegion for integrase B4492 sequence
tcagtttttgtcacaacgcggtttgtgcgaatcgtcgtgacagtaaaagacacctcctgattggggaggtgtctttctatttactctgcgaccgcttccgcccggtgtactgcgtcggtagtggattcctgcggcttcttgaacgcctcgttaaattcagccacggccgcctcgatcaagacttccatttcgtccgcatcaaagtcaatgcccttcttcttaagcagcgcctcagcggtttccagagccttattcagctt

SEQ ID NO: 30492 - DNA, 260 bp, Unknown
  Description of Unknown: RightRegion for integrase B4493 sequence
ggagataaagataatcccacttttacgctgaatctcaagccccgaatcccacgtatttaggggcttttctattagcgacaacatttttggactcacgaacttgcccatctcgagatgatctgcgccattgtgcaccagcttacccgcgacctgacacctgaacaattaaaggaatctggattcgaccaatattatgttgaccacacgttagcactttggcctcaggcagccagcggcacaccttggagcgcaacaacatt

SEQ ID NO: 30493 - DNA, 260 bp, Unknown
  Description of Unknown: RightRegion for integrase B4494 sequence
gagaagaatgatccgaacctgttcttggtgagagacaggttcggattatttctgttttaggactcgaaaaggcggcggaagcgcttatggtggaaaatggagaccaaatcccaataagccgcaagaccagcgctatctgggaaatcccggagaaatcaaaagaacgataatgaataacggtgatgtttacaagacaaaaatggggcctgatgggcgggcggaaatggaacggcatgagacaaatcacaaccgtggagata

SEQ ID NO: 30494 - DNA, 260 bp, Unknown
  Description of Unknown: RightRegion for integrase B4495 sequence
ccgggaataggtcgatatgttgataatccctttagattagagattttcctgaaactgtaaacccgcagtttcaggggattttcaaccacatacaacatcaatgttctaattcgtcagttccacaatgttgtatgtggtaatcccttcctatttataatagaataatatcacatatattttatatgctcaattctaattaggtaacttaagttccattcctgtgtaaagaggtgtattaatatccatatcgttgaattccg

SEQ ID NO: 30495 - DNA, 260 bp, Unknown; identical to SEQ ID NO: 30471
  Description of Unknown: RightRegion for integrase B4496 sequence

SEQ ID NO: 30496 - DNA, 109 bp, Unknown
  Description of Unknown: RightRegion for integrase B4497 sequence
ggaaaagggttcgtatgctgcttgccatgctccctcctgtgttgtgcgaacccttgttgaagttttgcagccgtttaatgggcgcgtttatgacccgtgctgcggctcc

SEQ ID NO: 30497 - DNA, 260 bp, Unknown
  Description of Unknown: RightRegion for integrase B4498 sequence
cggactcggattgcagtaagctcagacgaatggaaaataacagccaatcttgcggcttaactataagggcaggtacgaacctgcccttagctcattttatcatttgtgccagccaagtgtcaagaactttcccctctgatgcgtccgggtcgtttatgtatgctttagccatacgcacgtagttattagtatcgctgccaagaatttctgcaaaatcgctatgcagcatattcataacatagtaccaatcagctttacaa

SEQ ID NO: 30498 - DNA, 260 bp, Unknown
  Description of Unknown: RightRegion for integrase B4499 sequence
attgaatatagcagggataataatacagaatttatattagacgttttcctgaaggattaaatgtctatatctaactcaattgggcagtgatcggaacccatgacatcggttaagatctccgcatctttgatcttatctttgatagaatctgatgttaagaaataatcgatacgccatccggcattcttttctcttgccttaaatcgatagctccaccatgaatacttctctgtatctgggtgtaaatatcgataagaatc

SEQ ID NO: 30499 - DNA, 260 bp, Unknown
  Description of Unknown: RightRegion for integrase B4500 sequence
aataaacgttctaatgcatatactaaaccagttcttaaaatacgtataattttacgctaattttaaatgtattataaaaagttgtatcggcgttcaaatcgaagcattgattgattatgttcacctcttttatcaagaaaacacagcagaagctcgcaaagatatcttaattgaacagcgcgaccgcctacaaaaacaaattgatgctatgaatatagtaatagaacgtttaaataaaaaagtagaccgttatgaagaaa

SEQ ID NO: 30500 - DNA, 260 bp, Unknown; identical to SEQ ID NO: 30479
  Description of Unknown: RightRegion for integrase B4501 sequence

SEQ ID NO: 30501 - DNA, 260 bp, Unknown
  Description of Unknown: RightRegion for integrase B4502 sequence
aatcactcagatgccggctttaccctgaaaatataccctcttatcatgccgaaaaagtaagccaaacagttgagttttccacaaccaaaaagtgcttataagcctatgaaataaggcttttagcaaaacttctaccctcaacgtgcatacgaatacgcgcatggatggtggaagtaatataaacttaatacacagactgtctgtttacgttcattataaaaaagtaagactcacccttaattaaggagtgagcccgtttg

SEQ ID NO: 30502 - DNA, 109 bp, Unknown
  Description of Unknown: RightRegion for integrase B4503 sequence
ccgggaataggtcgatatgttgataatccctttagattagagattttcctgaaactgtaaacccgcagtttcaggggattttcaaccacatacaacatcaatgttctaa

SEQ ID NO: 30503 - DNA, 260 bp, Unknown
  Description of Unknown: RightRegion for integrase B4504 sequence
aataaacgttctaatgcatatactaaaccagttcttaaaatacgtataattttacgctaattttaaatgtattataaaaagttgtatcggcgttcaaatcgaagcattgattgattatgttcatctcttttatcaagaaaacacagcagaagctcgcaaagatatcttaattgaacagcaagaccgcctacaacaccaagacaaagctggaagtgcagaggtgcttttacgatacctttcttccagtatacacctacggc

SEQ ID NO: 30504 - DNA, 260 bp, Unknown; identical to SEQ ID NO: 30471
  Description of Unknown: RightRegion for integrase B4505 sequence

SEQ ID NO: 30505 - DNA, 260 bp, Unknown
  Description of Unknown: RightRegion for integrase B4506 sequence
gattacaccatcaccaagagcataggtcggacattcctgccgacaccggaattacagtaggaaatatgacaccggatataaacaacaacgcctgactgcaaccatgcaatcaggcgttctctcttgctcggaacttgaagttcgagcccttcgtggtcgagatgacaggattcgaacctgcgacctctgcgtcccgaaagtagtacaaaaatcccattacattcgattataaagcaccttttaaatcttttgtgacaccc

SEQ ID NO: 30506 - DNA, 260 bp, Unknown
  Description of Unknown: RightRegion for integrase B4507 sequence
tccagacatgaagtcggatttgtcatgaagtgtggtcttacttttaaggagatgatttgatgggacatacaccacttggctatcgtatcgagaatggcatcgcagttatcgatgaagaagctgcagctaaggtacgacagctatacaagaattaccttggtggtctttcacttacgaatgctgccaaagaagcaggaatcaatgcactgcatgctggttccaagcgaattatgcaaaacaagcattatctcggtgataac

SEQ ID NO: 30507 - DNA, 260 bp, Unknown; identical to SEQ ID NO: 30456
  Description of Unknown: RightRegion for integrase B4508 sequence

SEQ ID NO: 30508 - DNA, 260 bp, Unknown
  Description of Unknown: RightRegion for integrase B4509 sequence
ttcactatatcccccaaacgttcaaaaagccgtagcggtggattgacgcggttaaaataaaaaagcagagcgtcagccctgctttttatcaataattcgcaatacgatttatttgcgtatctattccttgttctgcaagagaaataaactctaatattttttcgctccatcctgcaattatgtttgttttttctccgatgaattgttgtgttccatatccctgcaaatcaactgcatgtacccacatattcggatttatt

SEQ ID NO: 30509 - DNA, 260 bp, Unknown
  Description of Unknown: RightRegion for integrase B4510 sequence
ccgggaataggtcgatatgttgataatccctttagattagagattttcctgaaactgtaaacccgcagtttcaggggattttcaaccacatacaacatcaatgttctaattcttccgtgcctatatcagtcagcaatccggcaacctccctgtatggcatggaatatctctgtgaaagatatctcattgatgctccaagctcgccatctggtccaccatacttcaataagatatacagtttttctacctatttatatatg

SEQ ID NO: 30510 - DNA, 260 bp, Unknown
  Description of Unknown: RightRegion for integrase B4511 sequence
gccccgaaccgtggctggattgtcggggatatttctgttgacgcaaatttgtgtatataattctatcatcgttgtaccgacgaatacgttccacgatgatgactataataaaagaggcggtttcccgcctcttttacatctcatgcaccatctgttctgtctcggcatatcttctctttacgtcttccggtacttcccagccatgattttcgtaaatccgccagagcctcttcgcatgtttcagctcttccctggctgtt

SEQ ID NO: 30511 - DNA, 260 bp, Unknown
  Description of Unknown: RightRegion for integrase B4512 sequence
ccgggagtaggtcgatatgttgataatccctttagattagagattttcctgaaactgtaaacccgcagtttcaggggattttcaaccacatacaacatcaatgttctaattcttccgtgcctatgtcagtcagcaatccggcaacctccctgtatggcatggaatatctctgtgaaagatatctcattgatgctccaagctcaccatctggtccaccatactgcgaaataatcattgctgccagcgtaggattacaattc

SEQ ID NO: 30512 - DNA, 260 bp, Unknown
  Description of Unknown: RightRegion for integrase B4513 sequence
gatgctaaaatgttcgttttgactcctgatagctccaccaaaaagcactgtacttcgtaggaagtatggtgcttttctttttctcagccgcaaaaaatgggggctgcactgccttgtctgcatcgttttcagatgttttgcaggcggttcagtgcagcccccgagtcattggtgcttcggcaggtcagaggatgccggttcagctgacgatctccagcatttgatcgaacatctcttccatctggcgcaccagcgtgaac

SEQ ID NO: 30513 - DNA, 260 bp, Unknown
  Description of Unknown: RightRegion for integrase B4514 sequence
cacaaagattgtatcgtagtccttcatgttgtcccgcttcacggcaatttccggtcgtgaagcgggatcgttcatttcaatcgtgctgcgggcgttcttttccatccagttcagatcagcttccgtgtaaggcaccttcggctcaatctcaaagatgtccgcgccgattgcctcagccagcgtctcggctacctttgcagtcacgccggacgcagaaaaatatgctacaagtttattactcattgtgttcttcctcatca

SEQ ID NO: 30514 - DNA, 109 bp, Unknown
  Description of Unknown: RightRegion for integrase B4515 sequence
ccgggaataggtcgatatgttgacaatccctttagattagaaattttcctgaaactgtaaacccgcagtttcaggggattttcaaccacatacaacattaatgttctaa

SEQ ID NO: 30515 - DNA, 260 bp, Unknown
  Description of Unknown: RightRegion for integrase B4516 sequence
tccagaaatgaagtgcgctttgaactgaaatgcggtctgacgcttcgagaaaggatatgaatacatgggacatacaccctacggctacagcattgaaaacggctgcgccactattaaagaggatgaagccaataagatacgaaagctctatgagaattacctctccgggatggcactggccaaggctgctgccgctgctggcattgaaacctaccacggcacggcaaagcgcctgatggaaaacaggcactacctcggag

SEQ ID NO: 30516 - DNA, 260 bp, Unknown
  Description of Unknown: RightRegion for integrase B4517 sequence
gatgccaaaatgttcgttttgactcctgatagctccaccaaaaagcactgtacttcgtaggaagtatggtgcttttctttttgctgaagccgatttttgggggctgcattgcttcgcctgcatgtcttttgggctttttgcggaaaaccgagatgttcccgcagataagcgggtccccataacaaaagagaccgccgtacagcaagctgtgaaccgccccaagattagtagacatgaataaaaagcgccctgtgtagggt

SEQ ID NO: 30517 - DNA, 109 bp, Unknown
  Description of Unknown: RightRegion for integrase B4518 sequence
tccagacaggaagtcggatttgtcatgaagtgtggtcttacttttaaggagatgatttgatgggacatacaccacttggctatcgtatcgagaatggcatcgcagttat

SEQ ID NO: 30518 - DNA, 109 bp, Unknown
  Description of Unknown: RightRegion for integrase B4519 sequence
attgaatatagcagggataataatacagaatttatattagacgttttcctgaaggattaaatgtctatatctaactcaattgggcagtgatcggaacccatgacatcgg

SEQ ID NO: 30519 - DNA, 260 bp, Unknown
  Description of Unknown: RightRegion for integrase B4520 sequence
aataaacgttctaatgcatatactaaaccagttcttaaaatacgtataattttacgctaattttaaatgtattataaaaagttgtatcggcgttcaaatcgaagcattgattgattatgttcacctcttttatcaagaaaacacagcagaagctcgcaaagatatcttaattgaacaacgcgaccgcttacaaaaacaaattgatgctatgaatatagtaatagaacgtttaaataaaaaagtagaccgttatgaagaaa

SEQ ID NO: 30520 - DNA, 109 bp, Unknown; identical to SEQ ID NO: 29944
  Description of Unknown: RightRegion for integrase B4521 sequence

SEQ ID NO: 30521 - DNA, 260 bp, Unknown
  Description of Unknown: RightRegion for integrase B4522 sequence
gagtctcttgaggtccaccatcaagctgcaccaaaaaagatgccgctgcgaaaagcctagaagtttcaacgacttccgggcttttttgcgcccatttttagaggcgtgacaaaaagatgccaaaatgggctttggcaaattcgatggacctgtacctttacccaaggctttttgagccgcttttccgagaatttttcgggaaagcggctcgcttttgctctcggcaaagtgtagaatttcgactggcgtttttgttggtt

SEQ ID NO: 30522 - DNA, 242 bp, Unknown
  Description of Unknown: RightRegion for integrase B4523 sequence
ggagataaagataatcccacttttacactgaatctcaagccccgaatcccgcgtatttaggggcttttctattagcgacaacatttttggactcacgaacttgcccatctcgagatgatctgcgccattgtgcaccagcttacccgcgacctgacacctgaacaattaaaggaatctggattcgaccaatattatgttgaccacacgttagcactttggcctcaggcagccagcggcacacc

SEQ ID NO: 30523 - DNA, 260 bp, Unknown; identical to SEQ ID NO: 30479
  Description of Unknown: RightRegion for integrase B4524 sequence

SEQ ID NO: 30524 - DNA, 260 bp, Unknown; identical to SEQ ID NO: 30513
  Description of Unknown: RightRegion for integrase B4525 sequence

SEQ ID NO: 30525 - DNA, 260 bp, Unknown
  Description of Unknown: RightRegion for integrase B4526 sequence
aataaacgttctaatgcatatactaaaccagttcttaaaatacgtataattttacgctaattttaaatgtattataaaaagttgtatcggcgttcaaattgaagcattaattgactatgttcacctcttttatcaagaaaacacagcagaagctcgcaaagatatcttaattgaacaacgcgaccgcctacaaaaacaaattgatgctatgaatatagtaatagaacgtttaaataaaaaagtagaccgttatgaagaaa

SEQ ID NO: 30526 - DNA, 109 bp, Unknown; identical to SEQ ID NO: 30502
  Description of Unknown: RightRegion for integrase B4527 sequence

SEQ ID NO: 30527 - DNA, 109 bp, Unknown
  Description of Unknown: RightRegion for integrase B4528 sequence
ccgggaataggtcgatatgttgacaatccctttagattagagattttcctgaaactgtaaacccgcagtttcaggggattttcaaccacatacaacatcaatgttctaa

SEQ ID NO: 30528 - DNA, 109 bp, Unknown
  Description of Unknown: RightRegion for integrase B4529 sequence
ggtgatgtcagaaatgctaattttgaattaactataaaacctaaaataccacgaaagtaagcgtaggcactaggcttacgcttacttctacaaattgcgggatgtttcc

SEQ ID NO: 30529 - DNA, 260 bp, Unknown
  Description of Unknown: RightRegion for integrase B4530 sequence
cacttttatataaattctaccgcctaccctattactttaatagtgccttttggcttttaaagtatataatgtattatataagatatattagttataatacaatgtattcagtataaaaactctataaatgaaaaataaggcctatcgtgctagtatctactaactacgataggcctattttatttaccaatcaaaactcagagctatgtgtccaccctcacatagtagggagattatggatcacctcgatttcatcgaat

SEQ ID NO: 30530 - DNA, 260 bp, Unknown
  Description of Unknown: RightRegion for integrase B4531 sequence
gccccgaaccgtggctggattgtcggggatatttctgttgacgcaaatttgtgtatataattctatcatcgttgtaccgacgaatacgttccacgatgatgactataataaaagaggcggtttcccgcctcttttacatctcatgcaccatctgttccgtctcggcgtatcttctctttacgtcttccggtacttcccagccatgattttcgtaaatccgccagagcctcttcgcatgtttcagctcttccctggctgtt

SEQ ID NO: 30531 - DNA, 173 bp, Unknown; identical to SEQ ID NO: 30465
  Description of Unknown: RightRegion for integrase B4532 sequence

SEQ ID NO: 30532 - DNA, 260 bp, Unknown
  Description of Unknown: RightRegion for integrase B4533 sequence
gatgccaaaatgttcgttttgcctcttgaatgctccaccaaaaagcactgtacttcgtaggaagtatggtgcttttctttttgctgaagccgatttttgggggctgcattgcttcgcctgcaccgttttcaggcttttgcaggcggttcctatacaacccccgacttttgactttacaccattttcaaaaaggaatgttttccgcccgttttttcagcaggctgctgcatcatccccttcaatgtacggcgtaaggtcga

SEQ ID NO: 30533 - DNA, 109 bp, Unknown
  Description of Unknown: RightRegion for integrase B4534 sequence
aacgcagtagagaataacgaggctgagtgttcgtttaagctctgctctgctccaccataagtcccgccgtgattttagtcaaattgcggcgggctttttgcgttgacac

SEQ ID NO: 30534 - DNA, 260 bp, Unknown
  Description of Unknown: RightRegion for integrase B4535 sequence
gatgctaaaatgttcgttttgactcctgatagctccaccaaaaagcactgtacttcataggaagtatggtgcttttctttttgctgaagccggtttttggtgggctgcattgcttcgcctgcgctgttttcaggcttttgcaggcggttcctatacaaccccccagcttttgactttacaccgttttcaaaaaggactgtttgccgcccgttttttcagcaggctgctgcatcatccccttcaatgtacggcgtaaggtc

SEQ ID NO: 30535 - DNA, 260 bp, Unknown; identical to SEQ ID NO: 30475
  Description of Unknown: RightRegion for integrase B4536 sequence

SEQ ID NO: 30536 - DNA, 260 bp, Unknown
  Description of Unknown: RightRegion for integrase B4537 sequence
gaaagcggtgcaatcacttttgtattgaagggagatttagagttcagcgcggaggtgtgaaatggcaaatagaatgattagtttcggatacgggatagacgggaataaaatttgcgttattgatcgggaagctgttgtggtgcgcgaaatattcgagaaatatgccgcagggaaactgttacaggaaatagccgatgaactaaccgcgcgtaacgtggatttttttcaaggaaactgtaattggaataaaaatcgcgttt

SEQ ID NO: 30537 - DNA, 109 bp, Unknown
  Description of Unknown: RightRegion for integrase B4538 sequence
gggaagaaagacacccccacttttgaactgacacttaagccccgaatcccgcgtatttaggggctttttcattagtaacaacaattacgggcggattcttccgtcccta

SEQ ID NO: 30538 - DNA, 260 bp, Unknown
  Description of Unknown: RightRegion for integrase B4539 sequence
gaaaaaggaaatcgttggagagaaagcacttttgagattgatataactcctcttatttaaatattttttatcaattccatcataagtgtgctatttctatgggaggctcccaggtatttttagaaccaggtgaaacccagagcgtagacactatgataaaatgtattgctgtctcctccgctaacgatgcatgtgtggcgtattcgcatagtaggaattaatttgctacctgaaatggattacggaatctgtaataaata

SEQ ID NO: 30539 - DNA, 109 bp, Unknown
  Description of Unknown: RightRegion for integrase B4540 sequence
atccgtaagatcgtaaagaactgtattttcgatggagaaaatctgaaaatcaccttctaaatcattcaatattatatacagatcggtacacccatcatcgctgtggagt

SEQ ID NO: 30540 - DNA, 260 bp, Unknown; identical to SEQ ID NO: 30483
  Description of Unknown: RightRegion for integrase B4541 sequence

SEQ ID NO: 30541 - DNA, 260 bp, Unknown
  Description of Unknown: RightRegion for integrase B4542 sequence
tccggaattggaagatatgtagataatccattcagattagagatattcttaaaactgtaaaagcccttaaacagggcttttacacaaccaccaacatagtggttctgatgaagagggtgttatggatgttatgcgcgaggaaggacgtgaggaaggacgtgctgatgctaccttaaaagatatcagaaacatcatgactaagcttaacaagtctgctgatgaagcgatggatatattagatgtcccaatcaaggaaagag

SEQ ID NO: 30542 - DNA, 260 bp, Unknown
  Description of Unknown: RightRegion for integrase B4543 sequence
gcacgcagtgtgctgcgcaagtgtgtatgggatggggagactctttttttagaattttaatttatgtatttttgcgactgtcgggactgcaacagaatcaaaaatatgtaaaattatttgaaaatgtattgacgtatcactcattgagtgctataataaaagcataaagggggaacaaaagaaaggaggaaaagatggacacattgaaggatgccatcggaataggaaaagacctgctagagatcttagtcttggcgctc

SEQ ID NO: 30543 - DNA, 260 bp, Unknown
  Description of Unknown: RightRegion for integrase B4544 sequence
gcccgcagtgtgctgcgcaagtgtgtgtgggatggtgagactctttttttagaattttaatttatgtctttttgtgactatcgggactgcgatagactcaaaaatatgtaaagaataaacctctttacttgtttgttcttttttgctatactgaaactgttccagaatgttgtaacatttgacaatggaactacaggtaaataaagagcgaaaaagccccggctaccatggggctttttcgttttttgcctatactgcac

SEQ ID NO: 30544 - DNA, 260 bp, Unknown
  Description of Unknown: RightRegion for integrase B4545 sequence
tgttcgtataagcgctgttatggttcaccagacttaattaaagtcgaacacttattttgagtgttcggcttttttctttatcaccgagttcgtcaaggctgatgcacttttcgccgtccttgtagttgaacagcacgatgattttatcatcataaacatgaacgctgtttacgaaaacatcgatcagccttaccggaaaaagaaaagactagccgtgtggggcgggtagagcggggaatggcagtggcaaataaaggaat

SEQ ID NO: 30545 - DNA, 260 bp, Unknown
  Description of Unknown: RightRegion for integrase B4546 sequence
tgttatgtgcaggttagccgcaattggtttgtaattgtcagcaacttaaagaacacctgatgggcggctcaatataagcccgtataagacacgaaaacggggcaccccttgttagggtgccccgttttaagctagattttcaagacttgccccggataaataacattcgggtttgcaatgccgtttttcgccgctaacgtctggtaggtggtgccgtatttcgcggcaattcctgaaagcgtgtcacctgatttcacggt

SEQ ID NO: 30546 - DNA, 260 bp, Unknown
  Description of Unknown: RightRegion for integrase B4547 sequence
gaaaaaggaaatcgttggagagaaagcacttttgagattgatataactcctcttatttaaatatttttatcaattccatcataagtgtgctatttctatgggaggctcccaggtatttttagaaccaggtgaaacccagagcgtagacactatgataaaatgtattgctgtctcctccgctaacgatgcatgtgtggcgtattcgcatagtaggaattaatttgctacctgaaatggattacggaatctgtaataaatat

SEQ ID NO: 30547 - DNA, 260 bp, Unknown
  Description of Unknown: RightRegion for integrase B4548 sequence
ttcacatttcatttgaagtgcggattgaatttgacagaaagggtgaagacagatggctagaggtatcattccgtttggatacaaaatggttgacggtacgatcggaatcgtgcccaaggaggcattgcagcttagaaggatgtgtcgagcctacttgtcagggctgtcactgagcaaggcggctgcagcggtcggattgaagaaagatcactcccgggccggggcattgatgctcaatccccggtactgtggtaacgagt

SEQ ID NO: 30548 - DNA, 109 bp, Unknown
  Description of Unknown: RightRegion for integrase B4549 sequence
gcaggtaaatatgaactaaaccttgactttttgcccattattccatcagtcgaagattaagcatataagatcaaatgacctacgaatggggatattctcggtcggcgcc

SEQ ID NO: 30549 - DNA, 260 bp, Unknown
  Description of Unknown: RightRegion for integrase B4550 sequence
ctggataaacttctacaaattattactcgcatgaaagtgagggaactatatgctgcctgaaaaaaatgaattctcaataattcaaattgagattgcaaaaataaaatttcttaacccacgaacaagaaataaggtagtgcatgaagaaataaaggaaagcataaaaaaaagaggattaagcaagccaataagcgtaatagctattgatgaaggcgatttcaaatatgctttaatttgtggtcaagggagaatagaggctc

SEQ ID NO: 30550 - DNA, 260 bp, Unknown; identical to SEQ ID NO: 30483
  Description of Unknown: RightRegion for integrase B4551 sequence

SEQ ID NO: 30551 - DNA, 260 bp, Unknown
  Description of Unknown: RightRegion for integrase B4552 sequence
ctcgtatttacgagctttttttgcgttttgagggtaaaaatttcaggtgtaaaaccgtagatgctttttcgataaaaaaggatctgaaccatcaacaattaaacatcgtcaaacaaaacggcagactttaagtatattttgctctaagcctgccgttttgtatataaaagaactttcacaaagttttcaatacaaatttattggatctgccgattttgttggtatctcttaaaatagagaaaccaataggatcggctttt

SEQ ID NO: 30552 - DNA, 260 bp, Unknown; identical to SEQ ID NO: 30456
  Description of Unknown: RightRegion for integrase B4553 sequence

SEQ ID NO: 30553 - DNA, 260 bp, Unknown
  Description of Unknown: RightRegion for integrase B4554 sequence
gctcgcagcgtactccgcaaatgcgtatgggacggtgagactctttttttagagttttaatttatgtctttttgtaactgttgggactgcaatagaatcaaaaagattcaaaaaacatttgaaaaggtattgacacgccactcattgagtgttataattaagatacattaaaggaagggaggtggtgatgtgaatgatcccatagaaataataaaagacctgctcgagatcatcgttcttctcgaaacgcttcgaacgat

SEQ ID NO: 30554 - DNA, 260 bp, Unknown
  Description of Unknown: RightRegion for integrase B4555 sequence
ctggataaacttctacaaattattactcgcatgaaagtgagggaactatatgctgcctgaatcaaatgaattcccaataatccaaattgaaattgccaaaataaaatttcttaacccgcgaactagaaataaggtagtgcatgaagaaattaaggaaagtataaaaaaaagaggattaagcaagcctataagcgtaagagcaattgatgaagacgacttcaaatatgctttaatttgtggccaagggagaatagaggctc

SEQ ID NO: 30555 - DNA, 260 bp, Unknown
  Description of Unknown: RightRegion for integrase B4556 sequence
agcgacctccatctgacaatccaccccaaaattgctatacctcaaacctctaacatttaagttattgctgctgcgcgctgcatgaagtaccccgttcaatctgctcgtgcttcggcggtgatgatctcgtgctcagcaacgatggctatcagctgttcgtaaccctcggtcagttctcgatcatccgacttgagcgcgacattcagctgctcatgcccgcttacgacgtatgtctgccgcggcgcgactgctcgaacagc

SEQ ID NO: 30556 - DNA, 109 bp, Unknown
  Description of Unknown: RightRegion for integrase B4557 sequence
attgaatatagcagggataataatacagaatttatattagacgttttcctgaaggattaaatgtctatatctaattcaattgggcagtgatcggaacccatgacatcgg

SEQ ID NO: 30557 - DNA, 260 bp, Unknown
  Description of Unknown: RightRegion for integrase B4558 sequence
gctagtccatattcctcgaaaaaggccttcacagcttcaccccctctccaaataaattgataataatttcaaacatgattgccataaacagcactgtcacgccaagcagcggcagcattccccaccattgaaaaaacatcagcttactctcggcacggctgctgcgctcacttctcagccactttgtggttgtttgaatcatgcggttaaactgaacgtaagcatcttccttgcccaccgtattatagcggtataaaagc

SEQ ID NO: 30558 - DNA, 260 bp, Unknown
  Description of Unknown: RightRegion for integrase B4559 sequence
gcccgcagtgtgctgcggaaatgtgtgtgggacggagagactctttttttagaattttaatttatgtctttttgtgactgttgggactgcaacagaatcaaaaatatgcgaaaaataaatctctttacttgtttattcttttttgctatactgaaactgttccagaatgttgtaaacatttgacaacggaactacaggtaaataaagagcgaaaaagccccggctaccatggggctttttcgttttttgcctatactgca

SEQ ID NO: 30559 - DNA, 260 bp, Unknown
  Description of Unknown: RightRegion for integrase B4560 sequence
ggagataaagacaatcccacttttacattaaatctcaagccccgaatcccgcgtatttaggggcttttctattagcgacaacatttttggactcacgaacttgcccatctcgagatgatctgcgccattgtgcaccagcttacccgcgacctgacacctgaacaattaaaggaatctggattcgaccaatattatgttgaccacacgttagcactttggcctcaggcagccagcggcacaccgtggagcgcaacaacatt

SEQ ID NO: 30560 - DNA, 151 bp, Unknown
  Description of Unknown: RightRegion for integrase B4561 sequence
ggagataaagataatcccacttttacactgaatctcaagccccgaatcccgcgtatttaggggctatttcattagcgacaacatttttggactcacgaacttgcccatctcgagatgatctgcgccattgtgcaccagcttacccgcgacc

SEQ ID NO: 30561 - DNA, 260 bp, Unknown
  Description of Unknown: RightRegion for integrase B4562 sequence
gaaaaaggaaatcgttggagagaaagcacttttgaaattgatataactcctcttatttaaatatttttatcaattccatcataagtgtgctatttctatgggaggctcccaggtatttttagaaccaggtgaaacccagagcgtagacactatgataaaatgtattgctgtctcctccgctaacgatgcatgtgtggcgtattcgcatagtaggaattaatttgctacctgaaatggattacggaatctgtaataaatat

SEQ ID NO: 30562 - DNA, 260 bp, Unknown
  Description of Unknown: RightRegion for integrase B4563 sequence
ccggaaaaccctttattttccgggaaattttccattcatacgcacttgcggtctggttgacccaatggggatcctgttccctgggcgagcagggctacagccccattgagatcctccgctacttctacggggaaagcatttacatcaacacggcagaccagatttccggcattcccatttcctggcctggatatgagctgacgctgggttcctccggcgataaagtccgccacgtccaggaacagctggataccatcgcc

SEQ ID NO: 30563 - DNA, 260 bp, Unknown
  Description of Unknown: RightRegion for integrase B4564 sequence
gcccgcagtgtgctgcgcaaatgcgtatgggacggggaaactctttttttagaattttaatttatgtctttttgtaactgttgggactgcaatagaatcaaaaagatgcaaaaaacatttgaaaaggtattgacacgccactcattgagtgttataattaagatacattaaaggaagggaggtggtgatgtgaatgatcccatagaaataataaaagacctgctcgagatcatcgttcttctcgaaacgcttcgaacgat

SEQ ID NO: 30564 - DNA, 260 bp, Unknown
  Description of Unknown: RightRegion for integrase B4565 sequence
attcgtaagatcgtaaagagttgtattttcgatggtgagaatctgaaaatcaccttctaaatcattcaatattatatacagatcggtacacccatcatcgctgtggagtccggttacgtggaagcccttggctggaatcagtacggcggctggcgcatcggaatccgcagctttgataaaaagcgttactactactatgcacaccttcgccagaatttcccttatgcgttggatttaaaggaaggaagcgtggtaaccgc

SEQ ID NO: 30565 - DNA, 260 bp, Unknown
  Description of Unknown: RightRegion for integrase B4566 sequence
agccttgtgtttgagcttaggtgcggtataaaactgagggaggaaattatatggaactgagaacgcttctttacggatataataaacatctatttcggtttttaattaacgaaacggaaagtgcggttgtaagaggtatttttgatgagtacataagcggcggaacattacagaaaatcgccgaccgcttaactgccgaaaacaccgtatattacaaagataaaacagtttggaataagcatatggtgcgacgcatcctt

SEQ ID NO: 30566 - DNA, 109 bp, Unknown
  Description of Unknown: RightRegion for integrase B4567 sequence
cctttttattgtttacagataccgcggagaatcgaactctgtgcagggcgcgagcgttaagcaaacgcggagcgcttgtagcgagcgggcgaggacgccgacaggcggc

SEQ ID NO: 30567 - DNA, 260 bp, Unknown
  Description of Unknown: RightRegion for integrase B4568 sequence
ttgctgagtagtgtcttgttcacaaacgctgatgatgtaaaagtctattataagatgtaaactatattgacattttcaccgtattgtatatattatattaacaaaaagccctgttttatgggctttttgttgtacttcatactgcgtctagtgtatcaacattagacgcagtatgaagtacaatttttaattcgtatattgcaaacgaattttacatatgatataatgccgtcaggcaaaacaatagaataagtccgtat

SEQ ID NO: 30568 - DNA, 260 bp, Unknown
  Description of Unknown: RightRegion for integrase B4569 sequence
ttggacttcctgcaaatgacgatttacccccgcgtaccggcgggggaaatacagggatagcatcccgtgtaaaacgaatttttctcactcccacttttcccccagtcgagttgcgcgtttgagaatgtcggcggcgaagcggcaggggcgaccaccgtctttaacggcaagacggccgcctgccccggcacgcagcccacgggcggctgctgcggccgcgtttcgacctgctcgaactgcggcaccacctgccagtgctc

SEQ ID NO: 30569 - DNA, 109 bp, Unknown
  Description of Unknown: RightRegion for integrase B4570 sequence
cgtaaaaaagaatggacaaaaattgatcagtttgtcattcagctttatcctaagatataataaaaccgttggtgcaccaacggtttttcttgtgtatatggtttgatgt

SEQ ID NO: 30570 - DNA, 260 bp, Unknown
  Description of Unknown: RightRegion for integrase B4571 sequence
ctggataaacttctacaaattattactcgcatgaaagtgagggaactatatgctgcctgaatcaaatgaattcccaataatccaaattgaaattgccaaaataaaatttcttaacccgcgaactagaaataaggtagtgcatgaagaaattaaggaaagcataaaaaaaagagggttaagcaagcctataagcgtaagagcgattgatgaagacgacttcaaatatgctttaatttgtggccaagggagaatagaggcgc

SEQ ID NO: 30571 - DNA, 260 bp, Unknown
  Description of Unknown: RightRegion for integrase B4572 sequence
ggagataaagacaatcccacttttacattaaatctcaagccccgaatcccgcgtatttaggggcttttctattagcgacaacatttttggactcacgaacgggcacaaaaacgttatcgctatttttttcttcctattataatgtggaattatacactatcatacacacttctttccaccataatatgcaaatactacagtcccagtaaagctctccatgtgttctgtccaacaatgccgtcagttgtaagtccatgcgc

SEQ ID NO: 30572 - DNA, 260 bp, Unknown
  Description of Unknown: RightRegion for integrase B4573 sequence
agcgacctccatctgacaatccaccccaaaattgctatacctcaaacctctaacatttaagttattgctgctgcgcgctgcatgaagtaccccgttcaatctgctcgtgcttcggcggtgacgatctcgtgctcagcaacgatggctatcagctgttcgtaaccctcggtcagttctcgatcatccgacttgagcgcgacattcagctgctcatgcccgcttacgacgtatgtctgccgcggcgcgactgctcgaacagc

SEQ ID NO: 30573 - DNA, 260 bp, Unknown; identical to SEQ ID NO: 30546
  Description of Unknown: RightRegion for integrase B4574 sequence

SEQ ID NO: 30574 - DNA, 260 bp, Unknown
  Description of Unknown: RightRegion for integrase B4575 sequence
ataaatccttctgataaagatgattttaaattaaagctatttcctaaaatacaagcatagattatttttttagtctatgcttgtaacattaatatcttgatttatcaaaatgtacccatgtaggtgttacagaaattggctcaacatatgaccacactcctgaatttcttgctgaattccataattgtcttcttcgtgtatctgataatgtttggcctacatcaaatgcggttccggcataatgttgactttgattaccg

SEQ ID NO: 30575 - DNA, 260 bp, Unknown
  Description of Unknown: RightRegion for integrase B4576 sequence
tccgaatatagtggacgtactaaaaatccatttaatttagaagtcttctttaaactatagaccacaaacgccctaaatttgggcgtttgtatctgctaccaacatagtttacatactccattattccatatattagtataatttctgtatataccaacaagtgtataagtctttgtgtttcttttctctttgttgcctatgctgttattgtcacaatatttaagattaatgctctcaccaatctcaccgttataaccgag

SEQ ID NO: 30576 - DNA, 260 bp, Unknown
  Description of Unknown: RightRegion for integrase B4577 sequence
gcccgcagtgtgctgcgcaaatgcgtatgggacggggagactctttttttagaattttaatttgtgtatttttgtaactgttgggactgcaatagactcaaaaatacgtaaagaataaacctctttactgatttattcttttttgctatactaaaactgttccagagtgttgtaaacatttgacaacggaactacaggtaaataaagagcgaaaaagccccggctaccatggggctttttcgttttttgcctatactgca

SEQ ID NO: 30577 - DNA, 260 bp, Unknown
  Description of Unknown: RightRegion for integrase B4578 sequence
agagataaagacaatcccacttttacattaaatctcaagccccgaatcccgcgtatttaggggcttttctattagcgacaacatttttggactcacgaacttgcccatctcgagatgatctgcgccattgtgcaccagcttacccgcgacctgacacctgaacaattaaaggaatctggattcgaccaatattatgttgaccacacgttagcactttggcctcaggcagccagcggcacaccttggagcgcaacaacatt

SEQ ID NO: 30578 - DNA, 260 bp, Unknown; identical to SEQ ID NO: 30546
  Description of Unknown: RightRegion for integrase B4579 sequence

SEQ ID NO: 30579 - DNA, 260 bp, Unknown
  Description of Unknown: RightRegion for integrase B4580 sequence
cacgggcatgaagacgaattttctataattgtctatccagttgtcccaaaacataaatagcgtaaaagcagtaaatatctgcctttacgcttaccgatatataagtggtctatattcctctgtcgcgatatccgtcaaaagcccggaaacttcacggtacggcatgctgtaccgctgggacaggtaacgcatggaggcgctggactccccgtcggggcctccgtattgactgataatcattgccgcaagtgccggattgg

SEQ ID NO: 30580 - DNA, 260 bp, Unknown; identical to SEQ ID NO: 30541
  Description of Unknown: RightRegion for integrase B4581 sequence

SEQ ID NO: 30581 - DNA, 260 bp, Unknown
  Description of Unknown: RightRegion for integrase B4582 sequence
gataccgctccctacgtactgcccaacaagccgcatttggagatttttctgaagggctagaggttgatagctaagctctaaccatcggcgaaactaacccgaaaacgttacagaaaaacgtatctgttaccttctgggttatacttcctttgcggaagggatttaagatgacaacgcagcaagcactttttgaagagctgaagagtacggcggtatcaccgtacgaagagctcaaagcgtatgaatatatgtactcacgt

SEQ ID NO: 30582 - DNA, 260 bp, Unknown
  Description of Unknown: RightRegion for integrase B4583 sequence
gaaaaaggaaatcgttggagaaaaagcacttttgagattgatataactcctcttatttaaatatttttatcaattccatcataagtgtgctatttctatgggaggctcccaggtatttttagaaccaggtgaaacccagagcgtagacactatgataaaatgtattgctgtctcctccgctaacgatgcatgtgtggcgtattcgcatagtaggaattaatttgctacctgaaatggattacggaatctgtaataaatat

SEQ ID NO: 30583 - DNA, 260 bp, Unknown
  Description of Unknown: RightRegion for integrase B4584 sequence
gcccgcagtgtgctgcgcaaatgcgtgtgggacggagagactctttttttagaattttaatttatgtctttttgtgactgttgggactgcaatagaatcaaaaagatgcaaaaaaacatttgaaaaggtattgacacgccactcattgagtgttataattaagatacattaaaggaagggaggtggtgatgtgaatgatcccatagaaataataaaagacctgctcgagatcatcgttcttctcgaaacgcttcgaacga

SEQ ID NO: 30584 - DNA, 109 bp, Unknown
  Description of Unknown: RightRegion for integrase B4585 sequence
attgacaacattgaaaactgcgcggaaagttcgtataaactctgcttaggtccaccataagtctcgccgtgattttagtcaaattgcggcgggctttttgcgttgacac

SEQ ID NO: 30585 - DNA, 260 bp, Unknown
  Description of Unknown: RightRegion for integrase B4586 sequence
attgaatatagcagggataataatacagaatttatattagacgttttccttaaggattaaatgtctatatctaactcaattgggcagtgatcggaacccatgacatcggttaagatctccgcatctttgatcttgtctttgatagaatcagatgttaagaaataatcgatacgccatccagcgttccgctctcttgccttaaatcgatagctccaccatgaatacttttctgtatctgggtgtaaatatcgataggaatc

SEQ ID NO: 30586 - DNA, 260 bp, Unknown
  Description of Unknown: RightRegion for integrase B4587 sequence
tccggaattggaagatatgtagataatccattcagattagagatattcttaaaactgtaaaagcccttaaacagggcttttacataaccaccaacagtaatgttctgatgaagaaggcgttatggagattctccgtgaagaagcccgcactgctggacttgaggaaggacgttccgctggacttgaagaaggacgtataaccgcagctatcgatgccattaaaaatatcatgacaaagcttgacaaatctgctgatgaag

SEQ ID NO: 30587 - DNA, 260 bp, Unknown
  Description of Unknown: RightRegion for integrase B4588 sequence
ggagataaagataatcccacttttacactgaatctcaagccccgaatcccgcgtatttaggggcttttctattagcgacaacatttttggactcacgaacttgcccatctcgagatgatctgcgccattgtgcaccagcttacccgcgacctgacacctgaacaattaaaggaatctggattcgaccaatattatgttgaccacacgttagcactttggcctcaggcagccagcggcacaccgtggagcgcaacaacatt

SEQ ID NO: 30588 - DNA, 260 bp, Unknown
  Description of Unknown: RightRegion for integrase B4589 sequence
gtattacacgaacctttttactttgtcggcggctttgccgtcacaatatggttcaagtaataccgacagaaaagaacggatattctcacttgttgagagtgtccgtcctttctttatgtcctgcggattgtccacggacagtctgcggacagtcacagaatgcagctattttcacttaccgttaagtaagatttccgtgatttttaaccgcgcattctcatttgcgcaagaatccacacaaacacaactctgaatgctat

SEQ ID NO: 30589 - DNA, 260 bp, Unknown
  Description of Unknown: RightRegion for integrase B4590 sequence
gctcgcagcgtactccgcaaatgcgtatgggacggtgagactctttttttagagttttaatttatgtctttttgtaactgttgagactgcgatagaatcaaaaatatgtaaaaaataaacctctttactgatttattcttttttgctatactgaaactgttccagaatgttgtaaacatttgacaacggaactacaggtaaataaagagcgaaaaagccccgactaccatggggctttttcgttttttgcctatactgca

SEQ ID NO: 30590 - DNA, 260 bp, Unknown
  Description of Unknown: RightRegion for integrase B4591 sequence
cttgataaacttctacaaattattactcgcatgaaagtgagggaactatatgctgcctgaaaaaaatgaattcccaataattcaaattgagattgcaaaaataaaatttcttaacccacgaacaagaaataaggtagtgcatgaagaaataaaggaaagcataaaaaaaagaggattaagcaagcctataagcgtaagagctattgatgaaggcgatttcaaatatgctttaatttgtggtcaagggagaatagaggctc

SEQ ID NO: 30591 - DNA, 260 bp, Unknown
  Description of Unknown: RightRegion for integrase B4592 sequence
gtcttgccagtgttagaggctgatgagttcgattttgacacttacaggatgattgagtaagccctctaaagaaggtaacttattgctaaaaaaaaatattctcaggggtagttatggctaacaaaaaacatagtgtgtttaaagccctttcaatgggctttgaaaaagttcttgatgagcgtggttatgataatggcgcttattacgtcaaggatggcaagatttggatttttgatattgtagctttaaagcaaaaatta

SEQ ID NO: 30592 - DNA, 260 bp, Unknown
  Description of Unknown: RightRegion for integrase B4593 sequence
ctggataaacttctacaaattattactcgcatgaaagtgagggaactatatgctgcctgaatcaaatgaattcccaataatccaaattgaaattgccaaaataaaatttcttaacccgcgaactagaaataaggtagtgcatgaagaaattaaggaaagtataaaaaaaagaggattaagcaagcctataagcgtaagagcgattgatgaagacgacttcaaatatgctttaatttgtggccaagggagaatagaggctc

SEQ ID NO: 30593 - DNA, 200 bp, Unknown
  Description of Unknown: RightRegion for integrase B4594 sequence
accgtgtgcttttggcaacgacagcttcatcgtgtgccggtccctttccgtcgatgttgagcagggtatccagctccaccagacgggcgtttttgcttctcagttcttcttcataaaggaatggctttccgacttcctcctttgcggcagcctgctgctgatagaggttatccagctgggcctttgccgcctccagacgc

SEQ ID NO: 30594 - DNA, 260 bp, Unknown
  Description of Unknown: RightRegion for integrase B4595 sequence
tgcgaagattgtcgtttctttttgttttgtatgtttatcttttcgtttttctttttttgattagaaagataacggacaaaagaaaaattatgcggaaaccggttttgtcatcgataatgcatcatccgtttgcagcttttccgagcaatagcaccgacgccgattgttatcgttttttctgttgtgtattagatttaaaaagaagcttcataaaaacattttgaaataattattgttgacaaaatgatgcaatatatgta

SEQ ID NO: 30595 - DNA, 260 bp, Unknown; identical to SEQ ID NO: 30483
  Description of Unknown: RightRegion for integrase B4596 sequence

SEQ ID NO: 30596 - DNA, 260 bp, Unknown
  Description of Unknown: RightRegion for integrase B4597 sequence
cttttttattacttacagataccgcggagaatcgaactctgtgcagggcgcgggcgttaggaaaacgcgtgagcgtttttagcccgcgggcgaggacgccggcaggcggccgaagccggtgcggatccgcgaagcggatacgcggacgtcctttcgcccgcaccattgaatggaagagctcccagcaatgggagcttttttgttatgggcctcttgttgatgtcacgttgctgcttcgtgcgggtatcctagtgccaacg

SEQ ID NO: 30597 - DNA, 260 bp, Unknown
  Description of Unknown: RightRegion for integrase B4598 sequence
cttttttattacttacagataccgcggagaatcgaactctatgcagggcgcgagcgttaaacaaacgcggagcgtttgtagcgagcgggcgaggacgccggcaggcggccgaagccggtgcgtatttgcgaagcaaatacgcggattctccgcgaaaacttcgactcaaaacggatgcgatgtttatcgaatctcagccggccatgcgccgcatcagcggatcccctcccgcaccgcggagaatcgaactctgtgcaggg

SEQ ID NO: 30598 - DNA, 260 bp, Unknown
  Description of Unknown: RightRegion for integrase B4599 sequence
cttgataaacttctacaaattattactcgcatgaaagtgagggaactatatgctgcctgaaaaaaatgaattcccaataattcaaattgagattgcaaaaataaaatttcttaacccacgaacaagaaataagttagtgcatgaagaaataaaggaaagcataaaaaaagaggattaagcaagcctataagcgtaagagctattgatgaaggcgatttcaaatatgctttaatttgtggtcaagggagaatagaggctct

SEQ ID NO: 30599 - DNA, 260 bp, Unknown
  Description of Unknown: RightRegion for integrase B4600 sequence
gcccgcagtgtgctgcggaaatgtgtatgggacggagagactctttttttagaattttaatttatgtctttttgtcactgttgggactgcaacagaatcaaaaatatgtgaaaaataaatctctttacttgtttattcttttttgctatactggaactgttccagaatgttgtaaacatttgacaacggaactacaggtaaataaagagcgaaaaagcccctgctaccatggggctttttcgttttttgcctatactgca

SEQ ID NO: 30600 - DNA, 260 bp, Unknown
  Description of Unknown: RightRegion for integrase B4601 sequence
ggacaccgtgatgatgcgtcctttgaacttactataaagccccgaatcccccgtatttaggggcttttacgttacttctaccaaaaatgggatacttcttccgtccctatatctgtaagcgtccccgtcacttcattatacggcatcgtataacgctgcgataaataccgcatagatgccgccaactcgccatccggtcctccaaattgactaatgatcacctgtgctattttgggatttgtctgcgtgatattcaccgg

SEQ ID NO: 30601 - DNA, 109 bp, Unknown
  Description of Unknown: RightRegion for integrase B4602 sequence
ttaatccgaaagatcactttttataaccaggagcacatcaaaattgaatataccgtttaattaaatattaggaaagtcccattttctgggactttccattatgtttcat

SEQ ID NO: 30602 - DNA, 260 bp, Unknown
  Description of Unknown: RightRegion for integrase B4603 sequence
cttgataaacttctacaaattattactcgcatgaaagtgagggaactatatgctgcctgaaaaaaatgaattcccaataattcaaattgagattgcaaaaataaaatttcttaacccacgaacaagaaataagttagtgcatgaagaaataaaggaaagcataaaaaaaagaggattaagcaagcctataagcgtaagagctattgatgaaggcgatttcaaatatgctttaatttgtggtcaagggagaatagaggctc

SEQ ID NO: 30603 - DNA, 260 bp, Unknown
  Description of Unknown: RightRegion for integrase B4604 sequence
ggagataaagataatcccacttttacactgaatctcaagccccgaatcccgcgtatttaggggcttttctattagcgacaacatttttggactcacgaacttgcccatctcgagatgatctgcgccattgtgcaccaacttacccgcgacctgacacctgaacaattaaaggaatctggattcgaccaatattatgttgaccacacgttagcactttggcctcaggcagccagcggcacaccttggagcgcaacaacatt

SEQ ID NO: 30604 - DNA, 260 bp, Unknown
  Description of Unknown: RightRegion for integrase B4605 sequence
cccgaatatagtggacgcactaaaaatccatttaatttggaagtcttctttaaactatagaccacaaacgccctaaatttgggcgtttgtatctgctaccaacatagtttacatactccattatatcaactatgttggtagtaacttagattgacagtaatagcgttttgttttatactaatttcattgcataaacagtaacatatatatgtattgaaatatacgattttgcattaattatgttttaagtttatttttaa

SEQ ID NO: 30605 - DNA, 260 bp, Unknown; identical to SEQ ID NO: 30587
  Description of Unknown: RightRegion for integrase B4606 sequence

SEQ ID NO: 30606 - DNA, 260 bp, Unknown
  Description of Unknown: RightRegion for integrase B4607 sequence
ggagataaagataatcccacttttacattaaatctcaagccccgaatcccgcgtatttaggggcttttctattagcgacaacatttttggactcacgaacttgcccatctcgagatgatctgtgccattgtgcaccagcttacccgcgacctgacacctgaacaattaaaggaatctggattcgaccaatattatgttgaccacacgttagcactttggcctcaggcagccagcggcacaccgtggagcgcaacaacatt

SEQ ID NO: 30607 - DNA, 260 bp, Unknown
  Description of Unknown: RightRegion for integrase B4608 sequence
gaaagtgacctctcgctcaccctccatcccgtggttttttcttcaaccaccaacagataacatcaatgcgcggatgaacttgcgcacatggagatgatctccgctatcgtgtaccagctgacgcgcaatctcacgcccgagcagatcaaggagggcggctttgacgcctactttgtcgatcacacgaccggcatttacccgcagtcggcctccggtatcccgtggagcgccgcaacgttccagtccaaaggcgacccgat

SEQ ID NO: 30608 - DNA, 260 bp, Unknown; identical to SEQ ID NO: 30555
  Description of Unknown: RightRegion for integrase B4609 sequence

SEQ ID NO: 30609 - DNA, 260 bp, Unknown
  Description of Unknown: RightRegion for integrase B4610 sequence
ttggacttcctgcaaatgacgatttacccccgcgtaccggcgggggaaatacagagatagcatcgcgtgtaagacgaatttttctcctgatgttatctttctatcttgaagccatggaaaaggggcgcgtttcctcgcgccccgtcagtcctactttccagatgtatcagccatgcgcacaactgtatttatataatatcataatgcttttatgccctcaagacgatttttaatgcaacttatgcaataaaaaatcaggc

SEQ ID NO: 30610 - DNA, 260 bp, Unknown
  Description of Unknown: RightRegion for integrase B4611 sequence
tattacgtggcatggcgcacgctcgtcatagtcaccaaatacaggaagaccccctgctagggggtcttctccttttctgaccaagtttccggctctacaccttgagcaggtagtcatccgccgcagggccgccggttggcttgcctactgccacgtatcgcttctggccagactgggcgcctgtgtagcgcccccagacccatccgtcggcgatcttgtaccagtcatcaagcgttacctcgccgcccttgttgtagtag

SEQ ID NO: 30611 - DNA, 260 bp, Unknown
  Description of Unknown: RightRegion for integrase B4612 sequence
agtcccaccaaagaaaaagacgttgaaacgcatgttttaacgtcttttctttttgtttgaccgcagttttgaccacacccgcgttttcatgcgttcagaactttgtcaaatgcagcgctcattgctgtggcggtttcgtgctcctcgccctcgatgcggtgcgaataggtcccgcgggtgtccatgttcttgctgtgccccacaagggctttcagtttgccgtcgggcaaatcctgggccattgatacaaacgtgtggcg

SEQ ID NO: 30612 - DNA, 260 bp, Unknown
  Description of Unknown: RightRegion for integrase B4613 sequence
tattatgtggcatggcggacactcgtcatagtcacgagatacaagaagacccccagctagggggtcttctccttttctgccgaggtgtcagcctcagactttgagcaggtaatcgtcagccgcagggccgcccgtgggcttaccaaccgcgacatatcgcttctgtccggactgagcgccggtgtagcgtccccagacccagccatcggcgatcttgtaccagtcatcgagcaccacggtctgccccttgttgtagctgg

SEQ ID NO: 30613 - DNA, 260 bp, Unknown
  Description of Unknown: RightRegion for integrase B4614 sequence
gaaaaaggaaatcgttggagagaaagcacttttgagattgatataactcctcttatttaaatatttttatcaattccttcatatgtgtgctatttctatgggaggctcccaggtatttttagaaccaggtgaaacccagagcgtagacactatgataaaatgtattgctgtctcctccgctaacgatgcatgtgtggcgtattcgcatagtaggaattaatttgctacctgaaatggattacggaatctgtaataaatat

SEQ ID NO: 30614 - DNA, 260 bp, Unknown
  Description of Unknown: RightRegion for integrase B4615 sequence
cccgaatatagtggacgcactaaaaatccatttaatttggaagtcttctttaaactatagaccacaaacgccctaaatttgggcgtttgtatctgctaccaacatagtttacatactccattattccatatattagtataatttctgtatataccaacaagtgtataagtctttgtgtttcttttctctttgttgcctatgctgttattgtcacaatatttaagattaatgctctcaccaatctcaccgttataaccgag

SEQ ID NO: 30615 - DNA, 109 bp, Unknown; identical to SEQ ID NO: 30556
  Description of Unknown: RightRegion for integrase B4616 sequence

SEQ ID NO: 30616 - DNA, 260 bp, Unknown
  Description of Unknown: RightRegion for integrase B4617 sequence
tccggaattggaagatatgtagataatccattcagattagagatattcttaaaactgtaaaagcccttaaacagggcttttacacaaccaccaacagtaatgttctgatgaagaaggcgttatggagattctccgtgaagaagcccgtgctgctggacttgaggaaggacgttccgctggacttaaggaaggacgttccgctggacttgaggaaggacatatcgccgccattaaaaatatcatgacaaagcttggcaaat

SEQ ID NO: 30617 - DNA, 103 bp, Unknown
  Description of Unknown: RightRegion for integrase B4618 sequence
ttttccgatagagaaaaagttcgcgcaagttctccatcggtcaaccaggaagccatctgattcgttcagatggcttttttgttttatctctcggtgcgttttt

SEQ ID NO: 30618 - DNA, 260 bp, Unknown; identical to SEQ ID NO: 30538
  Description of Unknown: RightRegion for integrase B4619 sequence

SEQ ID NO: 30619 - DNA, 190 bp, Unknown
  Description of Unknown: RightRegion for integrase B4620 sequence
tttaatccgtcgagcgtcttggatacttcacataggtgttactacacctattattcctaaggttatcaatacctcggctaacgtaaaacctcgggtaatcattcttttttcggcggcgctaaatggtcctgtgcctgcgccaatggctcgtatggtgcttaaactactctgccccccccccggaaagtct

SEQ ID NO: 30620 - DNA, 260 bp, Unknown
  Description of Unknown: RightRegion for integrase B4621 sequence
ataacccctaaagacaaagatgattttaaattaaaattatttcctaaaatacaagcatagattatttttattctatgcttgtaacattaaccttttgataaaagatttggaaaaccagcttgttccactggtggatttcctcaacttaaaagaggtagtttgagtaattatgtttgtatagcacaagatgatttgaatactcttggatttagaacaaatggattagatggtatttttggtgctggaactcaaaatgccgt

SEQ ID NO: 30621 - DNA, 260 bp, Unknown
  Description of Unknown: RightRegion for integrase B4622 sequence
cttgataaatttctacaaattattactcgcatgaaagtgagggaactatatgctgcctgaaaaaaatgaattcccaataattcaaattgagattgcaaaaataaaatttcttaacccacgaacaagaaataaggtagtgcatgaagaaataaaggaaagcataaaaaaaagaggattaagcaagcctataagcgtaagagctattgatgaagacgatttcaaatatgctttaatttgtggtcaagggagaatagaggctc

SEQ ID NO: 30622 - DNA, 260 bp, Unknown; identical to SEQ ID NO: 30603
  Description of Unknown: RightRegion for integrase B4623 sequence

SEQ ID NO: 30623 - DNA, 260 bp, Unknown
  Description of Unknown: RightRegion for integrase B4624 sequence
tgttcgtataagcgctgttatggttcaccagacttaattaaagtcgaacacttattttgagtgttcggctttttttctttatcaccgagttcgtcaaggctgatgcatttttcgccgtccttgtagttgaacagcacgatgattttatcatcataaacatgaacgctatttacgaaaacatcaatcagccttaccggaaaaataaaagacccgccgtgtggacgggtaatgacggtgcaaataaagaaatttaataatgc

SEQ ID NO: 30624 - DNA, 260 bp, Unknown
  Description of Unknown: RightRegion for integrase B4625 sequence
gggtacaaagatgatgcgtcctttgaactaactataaagcctcgaatcccgcgtatttaggggcttttcggttacttctacagaaaatgggaaacttcgttgtccagtattcggtagaagtaacgtgaaaccgcctatttacaagggtttccgagtttttcatatctcgtatttttgtctgtttttgtcagaatttcttgccggaaaactcccaatttccggacgagtttctacctataataatgctgatcaaaaaacgg

SEQ ID NO: 30625 - DNA, 260 bp, Unknown
  Description of Unknown: RightRegion for integrase B4626 sequence
gaactgtccaaaaagttcgcacaaggtcacgtcgcctccaccaacataaaagccacctgaaaacttacgtttttcaggtggcttttgctatatctgctatacctgctattctgttacgccagatccggcaggatgtccgaccacagagcctgctcctgccgcaaggcatcaaagcagcagtccagatacattttgttgaccgcggcaaaaatggtgctgcgcagcagcagacgctcgtcgttgagcgtggcctccggctg

SEQ ID NO: 30626 - DNA, 91 bp, Unknown
  Description of Unknown: RightRegion for integrase B4627 sequence
aacatccgggaagttcttaaagactctcttacgggtcaccatgattgccgaacactatagatgaaatggcgaaaaagccagtcatttcaac

SEQ ID NO: 30627 - DNA, 260 bp, Unknown
  Description of Unknown: RightRegion for integrase B4628 sequence
gaaagttcgacggtgaagcgtctggtccgagtggcgagaatcgaactcacggcctcttgaaccccattgtgcttctctcgaaaacacaatgtacaatccgatactgcctagactcagtatcgttaaatttcaaatgcattataccattctgtttcattggatgtcaagacgtttcattccttttgtggtcaaattgtggtcaaacgaccccgacaaatgacttttctcccccagctaagttacatcgcgcaatttcgatt

SEQ ID NO: 30628 - DNA, 260 bp, Unknown
  Description of Unknown: RightRegion for integrase B4629 sequence
aaagcctgccagtgctctatatggcaccatattagtcaactgttcttttgctttctttaaacctgcctgatgttcccgaatagcattctttatttcaatcttagatgcatttgccggaagatcactgagttctgtcagctgtaaaattgccctttccagaccatctctgaccaatccatctgcctgtattccactaagatgaatatgaaattcccgtactgaataccaggcattcgcaatcatttcattaataatctcat

SEQ ID NO: 30629 - DNA, 260 bp, Unknown
  Description of Unknown: RightRegion for integrase B4630 sequence
aactctttgttcttttttaagagcttgtttggatatacaacaaagtaccgagtagagtaatctacccggtactttattttttattttaggcttttatctcacagaagttcaggcatataaattcttttgcgtctttgattttaccccacttcgcgccggagcgtaaatatgttttttcaatttctaattctgccccggtttcaactgttcttacgataggagaggcatacgtgggtcgaacacgtacatttacattttct

SEQ ID NO: 30630 - DNA, 106 bp, Unknown
  Description of Unknown: RightRegion for integrase B4631 sequence
aactctttattcttttttaagagcttgtttggatatacgataaaataccgagtagagtaatctacccggtatttttttttttttttttttttttattttttatttt

SEQ ID NO: 30631 - DNA, 76 bp, Unknown
  Description of Unknown: RightRegion for integrase B4632 sequence
gaaagttcgacggtgaagcgtctggtccgagtggcgagaatcgaactcacggcctcttgaaccccattcaagcgcg

SEQ ID NO: 30632 - DNA, 260 bp, Unknown
  Description of Unknown: RightRegion for integrase B4633 sequence
ggctgttcgactgagaagcaaatggtccgagtggcgagaatcgaactcacggcctcttgaaccccattgtgcttctctcaaaaacgcaatggacactccgataccacttgtacgcagtatcatcaaatttcaaaattattttatcattctgtttcgttagatgtcaagatgtttcgtttcttttgtggtcaaattgtggtcaaccgaccctgacaaatgaccattctcccctactaagttacatggcgcaattccgattt

SEQ ID NO: 30633 - DNA, 260 bp, Unknown
  Description of Unknown: RightRegion for integrase B4634 sequence
tatgatgactatctggagttccggtttaagtccggtgtgacggtcagcgtggaaaagtgaatataatgatatgatccccctcatcaggtaggaagctgagacttcttgcttggtgagggggattttttctttttgggactaactagtcctgattactattgactttttttatgcttatatgctattatgaatacagttccggttgagcatatcattttaaactgactatggaggatgtcaaattatgaaaagagagaaga

SEQ ID NO: 30634 - DNA, 260 bp, Unknown
  Description of Unknown: RightRegion for integrase B4635 sequence
actcgaacacagacgagcggatataaatttagtatatcaatagataccaaagcggcataaatactaatcgttcatattgcacttatgttttacaaaaggctggcaccttatcgtgtcagcctttttttgttattctatcatctgcgccagccacacgtcaagtaccttgccttccgacgcgtctggatcgttcatgtaagcttttgctacacggatatacatattaatgtcattaccgtaaatttcggagtagtcggagt

SEQ ID NO: 30635 - DNA, 260 bp, Unknown
  Description of Unknown: RightRegion for integrase B4636 sequence
agagatgaagtgtgctttgaattaaagtgcggattgaagctgatagaaaggttggtgtagatatgatgcatacgccatacggctacaaaattgaaaatggccaagcggttattgatgaaccgctcgcaaagaaagtaagacagctttttgtggaatttttgaattgtggttctatgagggcagcagctgttaaggttggaattgaaaaaacacactccgtcattggcaggcttctaagaaatgaagtgtatttgggagat

SEQ ID NO: 30636 - DNA, 260 bp, Unknown
  Description of Unknown: RightRegion for integrase B4637 sequence
cgtttccgactctatggcgggctggaactgagggagcgattggaggtggcggtaagatgacaaaacgcaagattttatatggataccagatctgtggcggcgcattggagatcgttccggaagagcagcgggtcgttcagatgctgttcgccctctacagtgccagagcatcttaccaggacatctccgatgcgttgaatcggcagggcgttccatacagctccgaaataccgctttggaacaagcataagataaagcgc

SEQ ID NO: 30637 - DNA, 260 bp, Unknown
  Description of Unknown: RightRegion for integrase B4638 sequence
aatatccgggaagttcttaaagactctcttacgggtcaccatgattgccgaacactatagatgaaatggcgaaaaagccagtcatttcaacgtgttcggcaattttttattctcaaaattctttggtaactccatagatgaaatcacggatggcaggggttttgaacctctgtttttccatattcaagggatttttgctgtcagcgccctttttcagagggctgcggcggcaagattccggaaataacgaagaaaaatct

SEQ ID NO: 30638 - DNA, 260 bp, Unknown
  Description of Unknown: RightRegion for integrase B4639 sequence
actcgaacacagacgagcggatataaatttagtatatcaatagataccaaagcggcataaatactgatcgttcatattgcacttatgttttacaaaaggctggcaccttatcgtgtcagcctttttttgttattctatcatctgcgccagccacacgtcaagtaccttgccttccgacgcgtcagggtcgtgcatatagtttttagctacacggatatacatattaaggtcgccgttgtatacgtcgctaaaatcagacc

SEQ ID NO: 30639 - DNA, 260 bp, Unknown
  Description of Unknown: RightRegion for integrase B4640 sequence
cgagggcgcaagcagttcgacccggggacggtagatatcgtctggaagactgacgcgtaaaaagcgggccgcgaggcaaaaagggtgggatagcaggcaaatcgccctaacccacccagtataacacttagatagtttactgtcaatatgttcttcatcacacaataggtagaggggtgcctattgtgtggttttgcttatcacggtgataagtagacgtgttgaatgagagggtcatcggggtcttaacatgttaaata

SEQ ID NO: 30640 - DNA, 260 bp, Unknown
  Description of Unknown: RightRegion for integrase B4641 sequence
atcaaagtctccactaactggttttgcataataacactgtttagctcgaaaaaaagttagcaaaattcaatatgagcttgccttattatggggtataccctataataatagacgtaagaaagaaaggaggtggttcaaatggatgacaaaatatgggacttaacgattgctgtcataagcgtgctactggcaaaggcgctggatgaaggaatcgaagccctaaagaaaaagacctctcgtaagcccggaaagcacacaaa

SEQ ID NO: 30641 - DNA, 260 bp, Unknown
  Description of Unknown: RightRegion for integrase B4642 sequence
aggtacgaatctcgtctactttacaacctgacgatccctcgccccgatcttgccgcttaaatcatttgtacccctcgatcatcgcgcgcacctccgccgtcttctccatcagctcatcgtgcatggcgctataggccgcgatcattccctcggcatactccggcttcctcttgtattcctcgcccgccttgtacgcctcgatcatcttcttgaccaacgcgtggccgttggtgttaaacgcaatgtgcgcgttcgccatt

SEQ ID NO: 30642 - DNA, 260 bp, Unknown; identical to SEQ ID NO: 30636
  Description of Unknown: RightRegion for integrase B4643 sequence

SEQ ID NO: 30643 - DNA, 260 bp, Unknown
  Description of Unknown: RightRegion for integrase B4644 sequence
aacatatttgtaaataaggattggtttacaatagttttcgacataaaagagataggctagtgcctatctctttttcttacgctctgaagcccttgatatataaggctttcagaacctcgccgtttatttgcgttttaaggcggttgttttagtctcgtggacatattataccttgaattttatcctagaacttatcggaaagtgtattttcttcctctctcactgccatgacctgttcttgcagcacttcttccagcacg

SEQ ID NO: 30644 - DNA, 260 bp, Unknown
  Description of Unknown: RightRegion for integrase B4645 sequence
gaactgtccaaaaagttcgcacaaggtcacgtcgcctccaccaacataaaagccacctgaaaacttacgtttcaggtggcttttgctatatctgctattctgttacgccagatccggcaggatgtccgaccacagagcctgctcctgccgcaaggcatcaaagcagcagtccagatacattttgttgaccgcggcaaaaatggtgctgcgcagcagcagacgctcgtcgttgagcgtggcctccggctgggctgtcttgc

SEQ ID NO: 30645 - DNA, 260 bp, Unknown
  Description of Unknown: RightRegion for integrase B4646 sequence
ttgactcttgtgtttcacctaaaatgcggcttgaatctaaaagaaaggttggtgaaatagatgaaaacacatataccatacggatacagaattgtcgatggaaaggctattatcgataaggatgaggcagaacaggtaagaaggttatttgatgagtatatttccggtaaggcgttaaaggtagctgcagaaaacgtggggcttaatatatttcatagcagtgctggtaatatacttagaaatacccgctatcttggtga

SEQ ID NO: 30646 - DNA, 260 bp, Unknown
  Description of Unknown: RightRegion for integrase B4647 sequence
atcaaagtctccactaactggttttgcataataacactgtttagctcgaaaaaaagttagcaaaattcaatatgagcttgccttactatggggtataccttataatgatagacgtaagcaagaaaggaggtggttcaaatggatgacaaaatatgggacttaacgattgctgtcatcagcgtgctactggcaaaggcgctggatgaaggaatcgaagccctaaagaaaaagacctctcgcaagcccggaaagcacacaaa

SEQ ID NO: 30647 - DNA, 260 bp, Unknown
  Description of Unknown: RightRegion for integrase B4648 sequence
tgcaatttcacgcttaacgtgattccgctctttccggaaataaaaacaggagcagaatgactataatgacgccggacgtatacatgataccatatatcattatagcacaccactacatcttttgtttccggaacatttcggtgcaacggcagatgtcgccgttctttgcagcctgctgttccgtacggtatcttagttcctgaccggatcgctcgatttattcctgttttcagcaccagtttttctgatgactccttgta

SEQ ID NO: 30648 - DNA, 260 bp, Unknown
  Description of Unknown: RightRegion for integrase B4649 sequence
gaactgtccaaaaagttcgcacaaggtcacgtcacctccaccaacataaaagccacctgaaaacttacgtttttcaggtggcttttgctatatctgctatacctgctattctgttacgccagatccggcaggatatccgaccacagagcctgctcctgccgcaaggcatcaaagcagcagtccagatacattttgttgaccgcggcaaaaatggtgctgcgcagcagcagacgctcgtcgttgagcgtggcctccggctg

SEQ ID NO: 30649 - DNA, 260 bp, Unknown
  Description of Unknown: RightRegion for integrase B4650 sequence
ttccacctcaagtgtggattaaatctaactgaagggagtaaacatcatgtcaaagcttaaatacggttatcaatggcaagccggacaaattgtcatcaaccctgaccaagctgatgtaatcaagcaaatcttcgctggttttcttgctggccagactcgcaatcatctagcgcgccaatttaacttaactcatacttctgttttgcgaatcttaacttcaaataaatatgttggtggagacggctacccacaaatcatta

SEQ ID NO: 30650 - DNA, 94 bp, Unknown
  Description of Unknown: RightRegion for integrase B4651 sequence
gaaagttcgacggtgaagcgtctggtccgagtggcgagaatcgaactcacggcctcttgaaccccattcaagcgcgctaccaaaactgcgctac

SEQ ID NO: 30651 - DNA, 260 bp, Unknown
  Description of Unknown: RightRegion for integrase B4652 sequence
gaactgtccaaaaagttcgcacaaggtcacgttgcctccaccaacataaaagccacctgaaaacttacgtttttcaggtggcttttgctatatctgctatacctgctattctgttacgccagatccggcaggatgtccgaccacagagcctgctcctgccgcaaggcatcaaagcagcagtccagatacattttgttgaccgcggcaaaaatggtgctgcgcagcagcagacgctcgtcgttgagcgtggcctccggctg

SEQ ID NO: 30652 - DNA, 260 bp, Unknown
  Description of Unknown: RightRegion for integrase B4653 sequence
atcaaagtctccaataactggttttgcattgtaacattgttcaactcgaaaaaaagttaacgaaatcgaaaatcagcttgcgttactatggggtataccttataatagtagatgtaagcaagaaaggaggtggttcaaatggatgacaaaatatgggacttaacggttgctgtcatcggcgtgctactggcaaaagcgctagatgaaggaatcgaagccctgaagaaaaagacctctcgcaagccgggaaagcacgcaaa

SEQ ID NO: 30653 - DNA, 260 bp, Unknown; identical to SEQ ID NO: 30634
  Description of Unknown: RightRegion for integrase B4654 sequence

SEQ ID NO: 30654 - DNA, 109 bp, Unknown
  Description of Unknown: RightRegion for integrase B4655 sequence
cccggtaagggcaatcgctttttagaaaacaagttcagccttgagattttctttttatagctatcatatataacattgtggtaagtacgaattggggcaccttgaaatg

SEQ ID NO: 30655 - DNA, 260 bp, Unknown
  Description of Unknown: RightRegion for integrase B4656 sequence
aaatttgaaaaaagaacagctataatattaaatttagctgttcttttcttttttatataaaattacaaaatatccaatatctaaatatgtgacatctgctggtaccatatcttttattggtcttagtttatcatatcctatttcgtcaattgctttaaaaacttgacttttatatttcatattaatatttttttctaaatctatatccaaaccattttcaaaatttgctaataaatgatgctctatcgtttgctttgtaa

SEQ ID NO: 30656 - DNA, 260 bp, Unknown
  Description of Unknown: RightRegion for integrase B4657 sequence
ggagaggccgaaaaagcctcatttgaactcacaataaagccccgaatcccgcgtatttaggggctttttatcatttccaacaaaaacgggataaagatttatcccgttttctgtggaaatgattttaataggaagaaatgcaatacaaagatggtacaatattcaggattcctggggcttttgacggccccgggaattgttttacacctgctttccactgctgtcgaagctgtattcttttccggaaatgaccagcgtct

SEQ ID NO: 30657 - DNA, 260 bp, Unknown
  Description of Unknown: RightRegion for integrase B4658 sequence
aatctagactatctttacgaaatggctaagtgtatatcaatcagagggcaactaagatgaataaacaattatatgatatcgaaataagcaaaatttttatattgaaccctcgcgaacgaaataaacaaattgccggagaaataagaaaaaatattgaagatgttggcttaaaacgtccaataactatcacgcgcaaacagtttccacaagatggatacgaatatgatttagtttgtggacaaggaagattggaggcttat

SEQ ID NO: 30658 - DNA, 90 bp, Unknown
  Description of Unknown: RightRegion for integrase B4659 sequence
aacatccgggaagttcttaaagactctcttacgggtcaccatgattgccgaacactatagatgaaatggcaaaaaagccagtcatctcaa

SEQ ID NO: 30659 - DNA, 260 bp, Unknown
  Description of Unknown: RightRegion for integrase B4660 sequence
aactctttgttcttttttaagagcttgtttggatatacaacaaagtaccgagtagagtaatctacccggtactttgtttttttttgttttttattttaggcttttatctcacagaagttcaggcatataaattcttttgcgtctttgattttaccccacttcgcgccggggcgtgaatatgttttttcaatttccaattctgccccagcttcagctgttcttacgataggggagctatacgtgggtcgaacacgtacatt

SEQ ID NO: 30660 - DNA, 109 bp, Unknown
  Description of Unknown: RightRegion for integrase B4661 sequence
accaaaatgatgacgggattttccgggtgttcgcgttgcgaacgtttggtgacccggtagggattcgaaccctagacctactgattcgtagtcagtcactctatccagc

SEQ ID NO: 30661 - DNA, 260 bp, Unknown
  Description of Unknown: RightRegion for integrase B4662 sequence
atcaaagtctccactaactggttgtgcataataacactgtttagctcgaaaaaaagttagcaaaattcaatatgagcttgccttattatggggtataccctataataatagacgtaagaaagaaaggaggtggttcaaatggatgacaaaatatgggacttaacgattgctgtcataagcgtgctactggcaaaggcgctggatgaaggaatcgaagccctaaagaaaaagacctctcgtaagcccggaaagcacacaaa

SEQ ID NO: 30662 - DNA, 260 bp, Unknown
  Description of Unknown: RightRegion for integrase B4663 sequence
actcgaacacagacgagcggatataaatttagtatatcaatagataccaaagcggcataaatactaatcgttcatattgcacttatgttttacaaaaggctggcaccttatcgtgtcagcctttttttgttattctatcatctgcgccagccacacgtcaagtaccttgccttccgacgcgtctggatcgttcatgtaagcttttgctacacggatatacatattgatgtcgctgccgtaaatctcggagtagtcggagt

SEQ ID NO: 30663 - DNA, 260 bp, Unknown
  Description of Unknown: RightRegion for integrase B4664 sequence
aactctttgttcttttttaagagcttgtttggatatacaataaaataccgagtagagtaatctacccggtattttatttttttattaggctttatccaattacactctcttaagatacttacccgcgcacatccagtagccgctttccaactgacaccaattgccctgtcgagcgacaacgtagaagatttcaccccttgagtactgaccgactcggcgataccttactgacggtccttttctgacatataacattttgc

SEQ ID NO: 30664 - DNA, 260 bp, Unknown
  Description of Unknown: RightRegion for integrase B4665 sequence
gaactgtccaaaaagttcgcacaaggtcacgttgcctccaccaacataaaagccacctgaaaacttacgtttttcaggtggcttttgctatatctgctattctgttacgccagatccggcaggatatccgaccacagagcctgctcctgccgcaaggcatcaaagcagcagtccagatatattttgttgaccgcggcaaaaatggtgctgcgcagcagcagacgctcgtcgttgagcgtagtctccggctgggctgtctt

SEQ ID NO: 30665 - DNA, 260 bp, Unknown
  Description of Unknown: RightRegion for integrase B4666 sequence
actcggacacagccgagcgcatataattttagtatatcaatagatactaaagctgcataaatactaatcgttcatatagcgcttattttacaaaaggctgccacattatcgtgtcagtctttttttgttattatactatctgcgctaaccacatgtcaagcactttgccttccgacgcgtctggatcgttcatgtaagcttttgctacacggatatacatattaatgtcattaccgtaaatttcggagtagtcggagtgc

SEQ ID NO: 30666 - DNA, 109 bp, Unknown
  Description of Unknown: RightRegion for integrase B4667 sequence
accaaaatgatgacgggaaatcctgggtgttcgcgttgcgaacgtttggtgacccggtagggattcgaaccctagacctactgattcgtagtcagtcactctatccagc

SEQ ID NO: 30667 - DNA, 63 bp, Unknown
  Description of Unknown: RightRegion for integrase B4668 sequence
aacatccgggaagttcttaaagactctcttacgggtcaccatgattgccgaacactatagatg

SEQ ID NO: 30668 - DNA, 260 bp, Unknown
  Description of Unknown: RightRegion for integrase B4669 sequence
gtgctggtttttctttttgtgcgagggagcagacctcgaacaacactatttattatataaaagaaagcgcgatgaattctgagaactcatcgcgttttttctcttatgcgggtagtgggggtcgaacaacaaaaaatgattgagtgatgtcaaaaacatatctgcaatgcgtctaagcacttgctaaaaaggtagtggggttggtttgtagcccatgtattttgctacgtttacaaaaaagagtgttaccaaaactgtta

SEQ ID NO: 30669 - DNA, 260 bp, Unknown
  Description of Unknown: RightRegion for integrase B4670 sequence
gtgctggtttttctttttgtgcgagggagcagacctcgaacaacactatttattatataagaaagcgcgatgaattctgagaactcatcgcgctttttctcttatgcgggtagtgggggtcgaacaacaaaaaatgattgagcgacgtcaaaaacgtatctgcaacgcgcctaagcacttgctaaaaaggtagtgcggctggtttgtagcccatgtattttgctacgtttacaaaaaagagtgttaccaaatgtgttacc

SEQ ID NO: 30670 - DNA, 260 bp, Unknown; identical to SEQ ID NO: 30648
  Description of Unknown: RightRegion for integrase B4671 sequence

SEQ ID NO: 30671 - DNA, 260 bp, Unknown
  Description of Unknown: RightRegion for integrase B4672 sequence
cgtttccgactctatggcgggctggaactgagggagcgattggaggtggcggtaagatgacaaaacgtaagattttatatggataccagatccgtggcggcgcattggagatcgttccggaagagcagcgggtcgttcagatgctgttcgccctctacagtgccggagcatcttaccaggacatctccgatgcgttgaatcggcagggcgttccatacagctccgaaataccgctttggaacaagcataagataaagcgc

SEQ ID NO: 30672 - DNA, 260 bp, Unknown; identical to SEQ ID NO: 30664
  Description of Unknown: RightRegion for integrase B4673 sequence

SEQ ID NO: 30673 - DNA, 260 bp, Unknown
  Description of Unknown: RightRegion for integrase B4674 sequence
atcaaagtctccaataactggttttgcattgtaacattgttcaactcgaaaaaaagttaacgaaatcgaaaatcagcttgcgttactatggggtataccttataatagtagacgtaagcaagaaaggaggtggttcaaatggatgacaaaatatgggacttaacggttgctgtcatcggcgtgctactggcaaaagcgctagatgaaggaatcgaagccctgaagaaaaagacctctcgcaagccgggaaagcacgcaaa

SEQ ID NO: 30674 - DNA, 260 bp, Unknown
  Description of Unknown: RightRegion for integrase B4675 sequence
gaaagttcgacggtgaagcgtctggtccgagtggcgagaatcgaactcacggcctcttgaaccccattgtgcttctctcaaaaacgcaatggacactccgataccacttgtacgcagtatcatcaaatttcaaaattattttatcattctgtttcgttagatgtcaagatgtttcgtttcttttgtggtcaaattgtggtcaaccgaccctgacaaatgaccattctcccctactaagttacatggcgcaattccgattt

SEQ ID NO: 30675 - DNA, 260 bp, Unknown
  Description of Unknown: RightRegion for integrase B4676 sequence
actcttcacagggttcggatttttttgtgttttatccggggaaggctgtgtttggggtgattgtcagcagataataagagtgcccaagtttgccttggacaccggaatttgcttttcctttgaatacattttttagaaattgccaataagagtttcaaatatttcgataagttttttggattcggagtcatcaggaaataaaccttgataatctctgtcggaaaaaatgatattatatttatcacagtctaatggataac

SEQ ID NO: 30676 - DNA, 260 bp, Unknown
  Description of Unknown: RightRegion for integrase B4677 sequence
aacatggactatctttatgaaatggcgaaatgcatatctatccgagaggtaaaacaatgaacagagaattacgcaacgtggaaatcaataaaattttcgtgctgaatcccagagaacgtaacaaacaaatagccaaagaaatccgtcaaaatattgaagatgttggattaaagcgcccgattacgatttccaaaaaagctgttccacaagatggatatgaatatgatttagtttgtggacaaggcaggcttgaagcctat

SEQ ID NO: 30677 - DNA, 260 bp, Unknown
  Description of Unknown: RightRegion for integrase B4678 sequence
gaactgtccaaaaagttcgcacaaggtcacgtcacctccaccagtacaaaagccacctgaaaacttacgttttcaggtggcttttgctatatctgctattccgtgcttttctgtcacgccagatctggcaggatatccgaccacagagcctgctcctgccgcaaggcatcaaagcagcagtccagatacattttgttgaccgccgcaaaaatggtgctgcgcagcagcagacgctcgtcgttgagcgtagtctccggctg

SEQ ID NO: 30678 - DNA, 69 bp, Unknown
  Description of Unknown: RightRegion for integrase B4679 sequence
gaaagttcgtctgagatgcgtctggtccgagtggcgagaatcgaactcacggcctcttgaaccccattc

SEQ ID NO: 30679 - DNA, 260 bp, Unknown
  Description of Unknown: RightRegion for integrase B4680 sequence
ggtcatctgaatgagcctaactttgagttgaccataaagcccagaattccgcgcaaataaagggtttttcgttatttccaaaagaaacgggattattcttctgtaccaatatcagtcagtattcctgttacctctttatatggcatcgtatatcgctgtgaaagataacgcatagatgcagctaattcgccatccggcccaccgaactgacttataatgatcttcgccagtttcggattcgtctgggttatcttcacagg

SEQ ID NO: 30680 - DNA, 260 bp, Unknown
  Description of Unknown: RightRegion for integrase B4681 sequence
tttattgaacagattattttttatgatcgagacaatgtgcagatccgatataaaatgtgatatcggcaatgtgcagatccgatataaagccccagttttaggttgttgcaaaggtgtttgattctgcgtcatgtgtagacagtttggattggaaggattacggcgtagattctattattcataccgttttagatcataagcatctcggaaacggttccatcattctctgtcataacggtgctaaatatactgccgaggct

SEQ ID NO: 30681 - DNA, 260 bp, Unknown
  Description of Unknown: RightRegion for integrase B4682 sequence
attgtgttctacaaggatacaaatacccttgaattccactattacctcatggtagaataaagcctgtaacccgcataaatgctggatttatagaatagtagccgtatttccgaccatcccccaccatgccccgcatccaatacgatcaatggcataaaaaagctcccgcatatccttttgtttcatgatatgcgggagcttccccatttagatatttatttcaaaagtgctgccgtcacttcctgaggtattacaaattc

SEQ ID NO: 30682 - DNA, 260 bp, Unknown
  Description of Unknown: RightRegion for integrase B4683 sequence
cggaaccgtgacggtatgagcgtatatacttttactattgctataaatttagcagcttaattactatactaaaaggcaggattcgctcctgccttttctatttcccttgttaattttttatcgctacatacaatgcacacccagcaataacgtaggctatattacgctgtcttttaatttgttttcgctttaggttgaactctttttctaactgagccaaggattgattcgcattctgcaataagctctcctgctctttc

SEQ ID NO: 30683 - DNA, 260 bp, Unknown
  Description of Unknown: RightRegion for integrase B4684 sequence
attgtgttctacaaggatacaaatacccttgaattccactattacctcatggtagaatgaatcctgtaacccgcataaacactgaggttatagaatagtagctgtatttccggccatcccccaccatgccccgcatccaatacaatcaatgacataaaaaaactcccgcatatccttttgtttcatgatatgcgggagtttccccatttagatattttttgcttactttaaaattgctgccgtcacttcctgcggaatca

SEQ ID NO: 30684 - DNA, 77 bp, Unknown
  Description of Unknown: RightRegion for integrase B4685 sequence
aattgttcgactgggaatcatctggtccgagtggcgagaatcgaactcacggcctcttgaaccccattcaagcgcgc

SEQ ID NO: 30685 - DNA, 260 bp, Unknown
  Description of Unknown: RightRegion for integrase B4686 sequence
attgtgttctacaaggatacaaatacccttgaattccactattacctcatggtagaatgaatcctgtaacccgcataaacactggggttatagaatagtagctgtatttccgaccatcccccaccgtgccccgcatccaatacgatcaatggcataaaaaaactcccgcatatccttttgtttcatgatatgcgggagtttccccatttagatatttattttaaaagtgctgccgtcacttcctgagggattacaaattc

SEQ ID NO: 30686 - DNA, 260 bp, Unknown
  Description of Unknown: RightRegion for integrase B4687 sequence
attgtgttctacaaggatacaaatacccttgaattccactattacctcatggtagaataaagcctgtaacccgcataaatgctggatttatagaatagtagccgtatttccgaccatcccccaccatgccccgcatccaatacaatcaatgacataaaaaaactcccgcatatccttttgtttcatgatatgcgggagtttccccatttagatattttttgcttactttaaaattgctgccgtcacttcctgcggaatca

SEQ ID NO: 30687 - DNA, 260 bp, Unknown
  Description of Unknown: RightRegion for integrase B4688 sequence
tttattgaacagattattttttatgatcgagacaatgtgcagatccgatataaaatgtgatatcggcaatgtgcagatccgatataaagccccagttttaggctattgcaaaggtgtttgattctgcgtcatgtgtagacagtttggattggaaggattacggcgtagattctattattcataccgttttagatcataagcatctcggaaacggttccatcattctctgtcataacggtgctaaatatactgccgaggct

SEQ ID NO: 30688 - DNA, 109 bp, Unknown
  Description of Unknown: RightRegion for integrase B4689 sequence
attgtgttctacaaggatacaaatacccttgaattccactattacctcatggtagaataaagcctgtaacccgcataaatgctggatttatagaatagtagccgtattt

SEQ ID NO: 30689 - DNA, 260 bp, Unknown
  Description of Unknown: RightRegion for integrase B4690 sequence
ggtcatctgaatgagcctaactttgaattgaccataaagcccagaattccgcgcaaataaagggtttttcgttatttccaaaagaaacgggattattctttatcccaattcttttggaaatgaattacataataatatgaagaaactcgttttttcttctatcaaaatactatataaaatagatgatacaatattcaatcccccggagtcatttactccgggggatctatccgaaaccataatgatcgcttcggccagtt

SEQ ID NO: 30690 - DNA, 260 bp, Unknown
  Description of Unknown: RightRegion for integrase B4691 sequence
attgtgttctacaaggatacaaatacccttgaatttcactattacctcatggtagaatgaatcctataacccgcataaacactggggttatagaatagtagctgtatttccggtcatcccccaccatgccccgcatccaatacaatcaatgacataaaaaaactcccgcatatccttttgtttcatgatatgcgggagtttccccatttagatattttttgcttactttaaaattgctgccgtcacttcctgcggaatca

SEQ ID NO: 30691 - DNA, 70 bp, Unknown
  Description of Unknown: RightRegion for integrase B4692 sequence
gcgcaaagtcctgccaaaaggggctgttgcacatcctctaaaaaagaaagaccgaagtaaaagccaaaaa

SEQ ID NO: 30692 - DNA, 260 bp, Unknown
  Description of Unknown: RightRegion for integrase B4693 sequence
cataagcagccgatttttttctttgcttcttgcagaagggcgagaataggacggcagtgaataccgtgccctttggcacggtagagccgtcctgaccgacgagcgtcgagcgaggagaaagagtccttctgcccctgccaaaaaggtcggttgcaaaagcagccgatttttttgctctttgcagaaggacatttttccaattccagttttttcaaaatgcgcaactaaattcagttgcatttttatctttttgtgctata

SEQ ID NO: 30693 - DNA, 260 bp, Unknown
  Description of Unknown: RightRegion for integrase B4694 sequence
attgtgttctacaaggatacaaatacccttgaattccactattacctcatggtagaataaagcctgtaacccgcataaatgctggatttatagaatagtagccgtatttccggccatcccccaccatgccccgcatccaatacaatcaatgacataaaaaaactcccgcatatccttttgtttcatgatatgcgggagtttccccatttagatattttttgcttactttaaaattgctgccgtcacttcctgcggaatca

SEQ ID NO: 30694 - DNA, 260 bp, Unknown
  Description of Unknown: RightRegion for integrase B4695 sequence
attgtgttctacaaggatacaaatacccttgaattccactattacctcatggtagaataaagcctgtaacccgcataaatgctggatttatagaatagtagccgtatttccgaccatcccccaccatgccccgcatccaatacgatcaatgacataaaaaactcccgcatatccttttgtttcatgatatgcgggagtttccccatttagatattatttgcttactttaaaattgctgccgtcacttcctgcggaatcac

SEQ ID NO: 30695 - DNA, 183 bp, Unknown
  Description of Unknown: RightRegion for integrase B4696 sequence
attgtgttctacaaggatacaaatacccttgaattccactattatctcatggtagactaatctctgtaatccgcataaatgctggctttacagaatagtagctgtatttccgaccatcccccaccgtgccccgcatccaaaacgatcaatggcataaaaaaactcccgcatatcctcttggtt

SEQ ID NO: 30696 - DNA, 260 bp, Unknown
  Description of Unknown: RightRegion for integrase B4697 sequence
atcgtgttctacaaggatacaaatacccttgaattccactattacctcatggtagaatgaatcctgtaagccgcataaatgcgagctttatgatatagtagctgtatttccgaccatcccccaccgtgccccgcatccaatacgatcaatggcataaaaaaactcccgcatatccttttgtttcatgatatgcgggagtttccccatttagatattttttgcttactttaaaattgctgccgtcacttcctgcggaatca

SEQ ID NO: 30697 - DNA, 260 bp, Unknown
  Description of Unknown: RightRegion for integrase B4698 sequence
ggtttccgactgaattgcgggctaacactgaaggaggagttatgtacgggtacagaataattaacggtaaagccgttattgacgaaaaagaagctggtgtgatcagagagatttttaacgggtatatttctggattgagccttcaggatgctgctgagaatgcaggaagctcgatggttcatagcatggtgaaacgcatcatccgaaatttctgttatatcggtgatgactattatcccgcaatcgtcagccgacagact

SEQ ID NO: 30698 - DNA, 80 bp, Unknown
  Description of Unknown: RightRegion for integrase B4699 sequence
agttgttcgactgggaatcatctggtccgagtggcgagaatcgaactcacggcctcttgaaccccattcaagcgcgctac

SEQ ID NO: 30699 - DNA, 260 bp, Unknown
  Description of Unknown: RightRegion for integrase B4700 sequence
attgtgttctacaaggatacaaatacccttgaattccactattacctcatggtagaataaagcctgtaacccgcataaatgctggatttatagaatagtagccgtatttccgaccatcccccaccgtgccccgcatccaatacgatcaatggcataaaaaaactcccgcatatccttttgtttcatgatatgcgggagtttccccatttagatatttattttaaaagtgctgccgtcacttcctgagggattacaaattc

SEQ ID NO: 30700 - DNA, 188 bp, Unknown
  Description of Unknown: RightRegion for integrase B4701 sequence
caaaagcagccgatttttttattcgcttcttgcagaaggacgagaataggacggcagtgaataccgtgccctttggcacggtagagccgtcctgaccgacgagcgtcgagcgaggagaaagagtccttctgcccctgccaaaaggtcggttgcaaaagcagccgatttttttattcgcttcttgcaga

SEQ ID NO: 30701 - DNA, 260 bp, Unknown
  Description of Unknown: RightRegion for integrase B4702 sequence
agttgttcgactgggaatcatctggtccgagtggcgagaatcgaactcacggcctcttgaaccccattgtgcttctctcaaaaacgcaatggacactccgataccacttgtacgcagtatcatcaaatttcaaaattattttatcattctgtttcgttagatgtcaagatgtttcgtttcttttgtggtcaaattgtggtcaaccgaccctgacaaatgaccattctcccctactaagttacatggcgcaattccgattt

SEQ ID NO: 30702 - DNA, 260 bp, Unknown
  Description of Unknown: RightRegion for integrase B4703 sequence
atcgtgttctacaaggatacaaatacccttgaattccactattacctcatggtagaataaatcctgtaacccgcataaatgctggggttatagaatagtagccgtatttccgaccatcccccaccgtgacccgcatccaaaacgatcaatggcataaaaaaactcccgcatatcctcttggttcatgatatgcgggagttttggcttttagagatattttatttccaggaaaattcccctttgactgcttctgtatattg

SEQ ID NO: 30703 - DNA, 260 bp, Unknown; identical to SEQ ID NO: 30686
  Description of Unknown: RightRegion for integrase B4704 sequence

SEQ ID NO: 30704 - DNA, 260 bp, Unknown
  Description of Unknown: RightRegion for integrase B4705 sequence
attgtgttctacaaggatacaaatacccttgaattccactattacctcatggtagaataaagcttgtaacccgcataaatgctggatttatagaatagtagccgtatttccgaccatcccccaccgtgacccgcatccaacacgatcaatggcataaaaaactcccgcatatctttttgtttcatgatatgcggaagttttcccttttagatattcttttgtctactttaaaagtcctgccgtcactttctgcgggatca

SEQ ID NO: 30705 - DNA, 260 bp, Unknown
  Description of Unknown: RightRegion for integrase B4706 sequence
attgtgttctacaaggatacaaatacccttgaattccactattacctcatggtagaataaagcctgtaacccgcataaatgctggatttatagaatagtagccgcatttccgaccatcccccaccatgccccgcatccaatacaatcaatgacataaaaaaactcccgcatatccttttgtttcatgatatgcgggagtttccccatttagatattttttgcttactttaaaattgctgccgtcacttcctgcggaatca

SEQ ID NO: 30706 - DNA, 260 bp, Unknown
  Description of Unknown: RightRegion for integrase B4707 sequence
cacgaactaaataatctcattttttatgaaaggtacttctgtatccgcattgctgtataaggatagcccgccgagttttaagctcgacgggcttttctttttggccttccggaaaaagccgatggtttgaaacaaatttatgatatatgttggcacaagatatcaattgttttcatcacggagggtcgttagattgtctgcggctttgctgaaagcagccgctggtggggactacgggatttgaacctgtgacgagacgg

SEQ ID NO: 30707 - DNA, 260 bp, Unknown
  Description of Unknown: RightRegion for integrase B4708 sequence
attgtgttctacaaggatacaaatacccttgaattccactattacctcatggtagaatgaatcctgtaacccgcataaacactggggttatagaatagtagctgtatttccgaccatcccccaccatgccccgcatccaatacgatcaatggcataaaaaagctcccgcatatccttttgtttcatgatatgcgggagcttccccatttagatatttatttcaaaagtgctgccgtcacttcctgaggtattacaaattc

SEQ ID NO: 30708 - DNA, 260 bp, Unknown
  Description of Unknown: RightRegion for integrase B4709 sequence
ttcttatttttccctcatacttttgtctatgtttcttatgaaaagataccgtccgcctgatttattatatcataccgtgatgagaataggaatttatatttccttctgaaatgaaaaaagcggagaaaagcaatactcccctccgcttataattcagattaagaaacgtatgtctttccgccgcttactgcagcgatccatccggagggaatccgcatccagatatccgctcctacctgcttgatttcctggcaggttac

SEQ ID NO: 30709 - DNA, 260 bp, Unknown
  Description of Unknown: RightRegion for integrase B4710 sequence
attgtgttctacaaggatacaaatacccttgaattccactattacctcatggtagaatgaatcctgtaacccgcataaacactggggttatagaatagtagctgtatttccggccatcccccaccatgccccgcatccaatacaatcaatgacataaaaaaactcccgcatatccttttgtttcatgatatgcgggagtttccccatttagatattttttgcttactttaaaattgctgccgtcacttcctgcggaatca

SEQ ID NO: 30710 - DNA, 260 bp, Unknown
  Description of Unknown: RightRegion for integrase B4711 sequence
tttattgaacagattattttttatgatcgagacaatgtgcagatccgatataaaatgtgatatcggcaatgtgctgatccgatataaagccccagttttaggctattgcaaaggtgtttgattctgcgtcatgcgtagacagtttggattggaaggattacggcgtagattctattcttcataccgttttagatcataagcatctcggaaacggttccatcattctctgtcataacggtgctaaatatactgccgaggct

SEQ ID NO: 30711 - DNA, 260 bp, Unknown
  Description of Unknown: RightRegion for integrase B4712 sequence
tttattgaacagattattttttatgatcgagacaatgtgcagatccgatataaaatgtgatatcagcaatgtgcagatccgatataaagccccagttttaggttgttgcaaaggtgtttaattctgcgtcatgtgtagacagtttggattggaaggattacggcgtagattctattattcataccgttttagatcataagcatctcggaaacggttccatcattctctgtcataacggtgctaaatatactgccgaggct

SEQ ID NO: 30712 - DNA, 260 bp, Unknown
  Description of Unknown: RightRegion for integrase B4713 sequence
ggtcatctgaatgagcctaactttgaattgactataaagcccagaatcccgcgcaaataaagggttttttgttatttccaaaagaaacgggattattcttctgtaccaatatcagtcagtatccctgttacctctttatatggcatcgtatatcgctgtgaaagataacgcatagatgcagctaattcgccatccggcccaccgaactggcttataatgatcttcgccagtttcggattcgtctgggttatcttcacagg

SEQ ID NO: 30713 - DNA, 260 bp, Unknown
  Description of Unknown: RightRegion for integrase B4714 sequence
gcgaaagcagccgattttttattgacttcttgcagaaggacgagaataggacggcagtgaataccgtgccctttggcacggtagagccgtcctgaccgacgagcgtcgagcgaggagaaagagtccttctgcccctgccaaaaaggtcggttgcaaaagcagccgatttttttttgctctttgcagaaggacatttttccaattccagttttttcaaaatgcgcaactaaattcagttgcatttttatctttttgtgcta

SEQ ID NO: 30714 - DNA, 260 bp, Unknown
  Description of Unknown: RightRegion for integrase B4715 sequence
attgtgttctacaaggatacaaatacccttgaattccactattacctcatggtagaataaagcctgtaacccgcataaatgctggatttatagaatagtagccgtatttccgaccatcccccaccgtgacccgcatccaacacgatcaatggcataaaaaactcccgcatatctttttgtttcatgatatgcgggagttttcccttttagatattcttttgtctactttaaaagtcctgccgtcactttctgcgggatca

SEQ ID NO: 30715 - DNA, 109 bp, Unknown
  Description of Unknown: RightRegion for integrase B4716 sequence
ggtcatctgaatgagcctaattttgaattgaccataaagcccagaattccgcgcaaataaagggtttttcgttatttccaaaagaaacgggattattcttctgtaccaa

SEQ ID NO: 30716 - DNA, 131 bp, Unknown
  Description of Unknown: RightRegion for integrase B4717 sequence
attgtgttctacaaggatacaaatacccttgaattccactattacctcatggtagaatgaatcctggggagtatcctaaagtttgtgtaaacctccaaactgatgtaagataaaattactcagtttggagg

SEQ ID NO: 30717 - DNA, 100 bp, Unknown
  Description of Unknown: RightRegion for integrase B4718 sequence
accaaaatgatgacgggaaattccgagtgttcgcgttgcgaacgtttggtgacccggtagggattcgaaccctagacctactgattcgtagtcagtcact

SEQ ID NO: 30718 - DNA, 77 bp, Unknown
  Description of Unknown: RightRegion for integrase B4719 sequence
agttgttcgactgggaatcatctggtccgagtggcgagaatcgaactcacggcctcttgaaccccattcaagcgcgc

SEQ ID NO: 30719 - DNA, 260 bp, Unknown; identical to SEQ ID NO: 30686
  Description of Unknown: RightRegion for integrase B4720 sequence

SEQ ID NO: 30720 - DNA, 260 bp, Unknown
  Description of Unknown: RightRegion for integrase B4721 sequence
tttacgtcactatataaaatattagaaaaggctgtatttacgacaactggagtgttttaagcactccttttttaattatgtactttgttactagactcagttgaaacacctgctccaccgaagaatactatattattactttctttaagtatttgagtcaattgttctatttcattattcataaaatcatctccataaatatttataattttattattacacaaatataataaaaaataaaacatacagaaatttcgtgt

SEQ ID NO: 30721 - DNA, 260 bp, Unknown
  Description of Unknown: RightRegion for integrase B4722 sequence
ggctccaccatgcaaaaacgccatcccatttgggatggcgtttttgcatggctgcgctgaggggcgcgagaaaccctcgggttcgaccgactggatttcgcggcgtgtcaacgccgcaattttgcgctttgcgcaaaatcaaaaagaaaatccggtcggcacggaggcggcgaagctgccggagtattcccctcggctccatcccgccacagaaaggctcccctcccaggggagctgtcagcgaagctgactgagaggtt

SEQ ID NO: 30722 - DNA, 260 bp, Unknown
  Description of Unknown: RightRegion for integrase B4723 sequence
agttgttcgactgggaatcatctggtccgagtggcgagaatcgaactcacggcctcttgaaccccattgtgcttctctcgaaaacacaatgtacaatccgatactgcctagactcagtatcgttaaatttcaaatgcattataccattctgtttcattggatgtcaagacgtttcattccttttgtggtcaaattgtggtcaaacgaccccgacaaatgacctttctcccccagctaagttacatcgcgcaatttcgatt

SEQ ID NO: 30723 - DNA, 260 bp, Unknown
  Description of Unknown: RightRegion for integrase B4724 sequence
ggtcatctgaatgagcctaactttgaattgaccataaagccaagaatcccgcgcaagtaaagggttttttgttatttccaaaagaaacgggattattcttctgtaccaatatcagtcagtatccctgttacctctttatatggcatcgtatatcgctgtgaaagataacgcatagatgcagctaattcgccatccggcccaccgaactggcttataatgatcttcgccagtttcggattcgtctgggttatcttcacagg

SEQ ID NO: 30724 - DNA, 109 bp, Unknown
  Description of Unknown: RightRegion for integrase B4725 sequence
ggtcatctgaatgagcctaactttgaattgaccataaagccaagaatcccgcgcaagtaaagggttttttgttatttccaaaagaaacgggattattcttctgtaccaa

SEQ ID NO: 30725 - DNA, 260 bp, Unknown
  Description of Unknown: RightRegion for integrase B4726 sequence
attgtgttctacaaggatacaaatacccttgaattccactattacctcatggtagaatgaatcctgtaacccgcataattgctggatttatagaatagtagctgtatttccgaccatcccccaccatgccccgcatccaatacaatcaatgacataaaaaaactcccgcatatccttttgtttcatgatatgcgggagtttccccatttagatattttttgcttactttaaaattgctgccgtcacttcctgcggaatca

SEQ ID NO: 30726 - DNA, 109 bp, Unknown
  Description of Unknown: RightRegion for integrase B4727 sequence
ggtcatctgaatgagcctaactttgaattgaccataaagcccagaatcccgcgcaaataaagggttttttgttatttccaaaagaaacgggattattcttctgtaccaa

SEQ ID NO: 30727 - DNA, 206 bp, Unknown
  Description of Unknown: RightRegion for integrase B4728 sequence
atcgtgttctacaaggatacaaatacccttgaattccactattacctcatggtagaataaatcctgtaacccgcataaatgctggggttatagaatagtagccgtatttccgaccatcccccaccatgccccgcatccaatacaatcaatgacataaaaaaactcccgcatatccttttgtttcatgatatgcgggagtttcccca

SEQ ID NO: 30728 - DNA, 109 bp, Unknown
  Description of Unknown: RightRegion for integrase B4729 sequence
tttattgaacagattattttttatgatcgagacaatgtgcagatccgatataaaatgtgatatcggcaatgtgcagatccgatataaagccccagttttagcccattgc

SEQ ID NO: 30729 - DNA, 74 bp, Unknown
  Description of Unknown: RightRegion for integrase B4730 sequence
aattgttcgactgggaatcatctggtccgagtggcgagaatcgaactcacggcctcttgaaccccattcaagcg

SEQ ID NO: 30730 - DNA, 260 bp, Unknown
  Description of Unknown: RightRegion for integrase B4731 sequence
attgtgttctacaaagatacaaatacccttgaattccactattacctcatggtagaataactgctggaagccgcataaatgcaggctttgtgatatagtagccgtatttccgaccatcccccaccgtgacccgcatccaacacgatcaatggcataaaaaactcccgcatatctttttgtttcatgatatgcgggagttttcccttttagatattcttttgtctactttaaaagtcctgccgtcactttctgcgggatca

SEQ ID NO: 30731 - DNA, 260 bp, Unknown
  Description of Unknown: RightRegion for integrase B4732 sequence
attgtgttctacaaggatacaaatacccttgaattccactattacctcatggtagaatgaatcctgtaacccgcataaacactgtggttatagaatagtagctgtatttccgaccatcccccaccgtgacccgcatccaaaacgatcaatggcataaaaaaactcccgcatatctttttgtttcatgatatgcgggagttttcccttttagatattcttttgtctactttaaaagtcctgccgtcactttctgcgggatc

SEQ ID NO: 30732 - DNA, 260 bp, Unknown
  Description of Unknown: RightRegion for integrase B4733 sequence
attgtattctacaaagatacaaatacccttgaattccactattacctcatggtagaatgaatcccgtaacccgtataaacactggggttatagaatagtagctgtatttccgaccatcccccaccatgccccgcatccaatacaatcaatgacataaaaaaactcccgcatatccttttgtttcatgatatgcgggagtttccccatttagatattttttgcttactttaaaattgctgccgtcacttcctgcggaatca

SEQ ID NO: 30733 - DNA, 260 bp, Unknown
  Description of Unknown: RightRegion for integrase B4734 sequence
agttgttcgactgggaatcatttggtccgagtggcgagaatcgaactcacggcctcttgaaccccattgtgcttctctcaaaaacgcaatggacactccgataccacttgtacgcagtatcatcaaatttcaaaattattttatcattctgtttcgttagatgtcaagatgtttcgtttcttttgtggtcaaattgtggtcaaccgaccctgacaaatgaccattctcccctactaagttacatggcgcaattccgattt

SEQ ID NO: 30734 - DNA, 260 bp, Unknown
  Description of Unknown: RightRegion for integrase B4735 sequence
atcaaagtttctcacaactggttttgcatcataacactgattagcacgcaaaaaagttagcaaaattcaaattcacgcttgcgttactatggggtctaccctataatagtagacacaaggaagaaaggaggtggttaaaatggatgacaaaatatgggacttggcagtatccatcatcggcataatccttgcaaaggcgctcgatgaaggaatccaagccctaaaagaaaagacctctcgcaagccgggaaagcatgaga

SEQ ID NO: 30735 - DNA, 260 bp, Unknown
  Description of Unknown: RightRegion for integrase B4736 sequence
ggtcatctgaatgagcctaactttgaattgaccataaagcccagaattccgcgcaaataaagggtttttcgttatttccaaaagaaacgggattattcttctgtaccaatatcagtcagtatccctgttacctctttatatggcatcgtatatcgctgtgaaagataacgcatagatgcagctaattcgccatccggcccaccgaactggcttataatgatcttcgccagtttcggattcgtctgggttatcttcacagg

SEQ ID NO: 30736 - DNA, 260 bp, Unknown
  Description of Unknown: RightRegion for integrase B4737 sequence
cacgaactaaataaccttattttttatgaaagatacttctgtatccgcattgctgtatgatgatagcccgccgagcgcatgctcgacgggcttttctttttagccttctgggaaaagccgattggttagaaacaaatttatgatatatgttggcacaagatatcagttgttttcgtcccggaaggctgttagattgtctgcggctttgctgaaagcagccgctggtggggactacaggatttgaacctgtgcctggacgg

SEQ ID NO: 30737 - DNA, 260 bp, Unknown
  Description of Unknown: RightRegion for integrase B4738 sequence
attgtcttttacaaaaatgaggattcctttgaatttcattactatttgatgatagattaattcctgaaagcccgcataaatgcatcctttaagcactgtagctgtattttgcatcacgctccgccatgaccggcatcaagtgctacaagtgccatataaaaagacctcccacataactttctataagctatgcggaaggtctgattctgtgtctgtcctgttacggtttttaatttcatatccgaacttcttgtcatact

SEQ ID NO: 30738 - DNA, 260 bp, Unknown
  Description of Unknown: RightRegion for integrase B4739 sequence
cggactcggattgcagtaagctcagacacatggaaaatatcagcaaatcttgcggcttaactataagggcaggcgagaacctgcccttagctcattatagcatctgtgccagccaagcgtcaagaactttcccctctgatgcgtccgggtcgtttatgtacgccttagccatacgcacgtagttgttggtgtcgcttccaagaatttcagcaaaatcactatgcagcatattcataacatagtaccaatcagctttacaa

SEQ ID NO: 30739 - DNA, 109 bp, Unknown
  Description of Unknown: RightRegion for integrase B4740 sequence
atctgcggatgctgcttttttccgaaattgcgcggcacaagcagccgctttcatatgtgaatatcactgccaccgggtaggaatgcaattcgcattcgtttgtacatcg

SEQ ID NO: 30740 - DNA, 109 bp, Unknown
  Description of Unknown: RightRegion for integrase B4741 sequence
ggtcatctgaatgagcctaactttgaattgaccataaagcccagaatcccgcgcaaataaagggttttttcgttatttccaaaagaaacgggattattcttctgtacca

SEQ ID NO: 30741 - DNA, 260 bp, Unknown
  Description of Unknown: RightRegion for integrase B4742 sequence
cacgaactaaataacctcattttctttgacaaatacttctgtatccgcattgctgtatgatgatagcccgccgagcgcatgctcgacgggcttttttttgagccttccggtgaaagccgattggttccgaacaaacttatgagatatatgctggcacaagatatcgaatgtttgcgacccggaaggctgttagattgtttgcggctttgctgaaagcagtcgcaagtgagtgtggacttacaacacactcactatcggag

SEQ ID NO: 30742 - DNA, 260 bp, Unknown
  Description of Unknown: RightRegion for integrase B4743 sequence
attgtgttctacaaggatacaaatacccttgaattccactattacctcatggtagaataaagcttgtaacccgcataaatgctggatttatagaatagtagccgtatttccgaccatcccccaccatgccccgcatccaatacgatcaatggcataaaaaagctcccgcatatccttttgtttcatgatatgcgggagtttccccatttagatattttttgcttactttaaaattgctgccgtcacttcctgcggaatca

SEQ ID NO: 30743 - DNA, 260 bp, Unknown
  Description of Unknown: RightRegion for integrase B4744 sequence
atcgtgttctacaaggatacaaatacccttgaattccactattacctcatggtagaataaatcctgtaacccgcataaatgctggggttatagaatagtagccgtatttccgaccatcccccaccatgccccgcatccaatacaatcaatgacataaaaaaactcccgcatatccttttgtttcatgatatgcgggagtttccccatttagatattttttgcttactttaaaattgctgccgtcacttcctgcggaatca

SEQ ID NO: 30744 - DNA, 68 bp, Unknown
  Description of Unknown: RightRegion for integrase B4745 sequence
gaaagttcgtctgagatgcgtctggtccgagtggcgagaatcgaactcacggcctcttgaaccccatt

SEQ ID NO: 30745 - DNA, 260 bp, Unknown
  Description of Unknown: RightRegion for integrase B4746 sequence
attgtgttctacaaggatacaaatacccttgaattccactattacctcatggtagaatgaatcctgtaacccgcataaacactggggttatagaatagtagctgtatttccgaccatcccccaccatgccccgcatccaatacaatcaatgacataaaaaaactcccgcatatccttttgtttcatgatatgcgggagtttccccatttagatattttttgcttactttaaaattgctgccgtcacttcctgcggaatca

SEQ ID NO: 30746 - DNA, 260 bp, Unknown; identical to SEQ ID NO: 30701
  Description of Unknown: RightRegion for integrase B4747 sequence

SEQ ID NO: 30747 - DNA, 109 bp, Unknown
  Description of Unknown: RightRegion for integrase B4748 sequence
ggcaatttcactcttaacgtgattccgctctttccggaaataaaaacaggagcagaatgactataatgacgccggacgtatacatacggccctccgctggcggtttcgc

SEQ ID NO: 30748 - DNA, 109 bp, Unknown
  Description of Unknown: RightRegion for integrase B4749 sequence
attgtgttctacaaggatacaaatacccttgaattccactattacctcatggtagaataaagcttgtaacccgcataaatgctggatttatagaatagtagccgtattt

SEQ ID NO: 30749 - DNA, 260 bp, Unknown; identical to SEQ ID NO: 30679
  Description of Unknown: RightRegion for integrase B4750 sequence

SEQ ID NO: 30750 - DNA, 260 bp, Unknown
  Description of Unknown: RightRegion for integrase B4751 sequence
ggctccaccatgcaaaaacgccatcccatttgggatggcgtttttgcatggctgcgctgaggggcgcgagaaacccttgggttcgaccgactggatttcgcggcgtgtcaacgccgcaattttgcgctttgcgcaaaatcaaaaagaaaatccagtcggcacggaggcggcgaagccgccggagtattcccctcagctccatcccgccacagaaaggctcccctcccaggggagctgtcagcgaagctgactgagaggtt

SEQ ID NO: 30751 - DNA, 109 bp, Unknown
  Description of Unknown: RightRegion for integrase B4752 sequence
ggtcatctgaatgagcctaactttgaattgaccataaagcccagaattccgcgcaaataaagggtttttcgttatttccaaaagaaacgggattattcttctgtaccaa

SEQ ID NO: 30752 - DNA, 260 bp, Unknown
  Description of Unknown: RightRegion for integrase B4753 sequence
atcgtgttctacaaggatacaaatacccttgaattccactattacctcatggtagaatgaatcccgtaacccgcataaacactggggttatagaatagtagctgtatttccgaccatcccccaccatgccccgcatccaatacaatcaatgacataaaaaaactcccgcatatccttttgtttcatgatatgcgggagtttccccatttagatattttttgcttactttaaaattgctgccgtcacttcctgcggaatca

SEQ ID NO: 30753 - DNA, 76 bp, Unknown
  Description of Unknown: RightRegion for integrase B4754 sequence
agttgttcgactgggaatcatctggtccgagtggcgagaatcgaactcacggcctcttgaaccccattcaagcgcg

SEQ ID NO: 30754 - DNA, 260 bp, Unknown
  Description of Unknown: RightRegion for integrase B4755 sequence
aaaataaatccacaaagcaaagatgattttaagcttactatttatcctaaaatatattaatataccaacataaattatttttttattttatgcatgtatcatttacattttgataaacgaagaggaacaccagcatgtagtacaggtggatatcctcttataaaacaaggttcaagaggagcttatgtatgtattgcacaagataatttaaacacattaggttatagaacaggtggattagatggagtatttggtgcaca

SEQ ID NO: 30755 - DNA, 260 bp, Unknown
  Description of Unknown: RightRegion for integrase B4756 sequence
tttattgaacagattattttttatgatcgagacaatgtgcagatccgatataaaatatgatatcggcaatgtgcagatccgatataaagccccagttttagcccattgcaaaggtgtttgattctgcgtcatgtgtagacagtttggattggaaggattacggcgtagattctattcttcataccgttttagatcataagcatctcggaaacggttccatcattctctgtcataacggtgctaaatatactgccgaggct

SEQ ID NO: 30756 - DNA, 260 bp, Unknown
  Description of Unknown: RightRegion for integrase B4757 sequence
agttgttcgactgggaatcatctggtccgagtggcgagaatcgaactcacggcctcttgaaccccattgtgcttctctcgaaaacacaatgtacaatccgatactgcctagactcagtatcgttaaatttcaaatgtattatatcattctgtttcattggatgtcaagacgtttcattccttttgtggtcaaattgtggtcaaacgaacccgacaaatgacctttctcccccggctaagttacatcgcgcaatttcgatt

SEQ ID NO: 30757 - DNA, 109 bp, Unknown
  Description of Unknown: RightRegion for integrase B4758 sequence
ggtcatctgaatgagcctaactttgaattgaccataaagccaagaatcccgcgcaaataaagggttttttgttatttccaaaagaaacgggattattcttctgtaccaa

SEQ ID NO: 30758 - DNA, 109 bp, Unknown
  Description of Unknown: RightRegion for integrase B4759 sequence
ggtcatctgaatgagcctaactttgaattgaccataaagcccagaattccgcgcaaataaagggttttttcgttatttccaaaagaaacgggattattcttctgtacca

SEQ ID NO: 30759 - DNA, 109 bp, Unknown
  Description of Unknown: RightRegion for integrase B4760 sequence
ggtcatctgaatgagcctaactttgaattgaccataaagcccagaatcccgcgcaaataaagggtttttcgttatttccaaaagaaacgggattattcttctgtaccaa

SEQ ID NO: 30760 - DNA, 260 bp, Unknown
  Description of Unknown: RightRegion for integrase B4761 sequence
tttattgaacagattattttttatgatcgagacaatgtgcagatccgatataaaatgtgatatcggcaatgtgcagatccgatataaagccccagttttaggttattgcaaaggcgtttgattctgcgtcatgtgtagacagtttggattggaaggattacggcgtagattctattcttcataccgttttagatcataagcatctcggaaacggttccatcattctctgtcataacggtgctaaatatactgccgaggct

SEQ ID NO: 30761 - DNA, 260 bp, Unknown
  Description of Unknown: RightRegion for integrase B4762 sequence
attgtgttctacaaggatacaaatacccttgaattccactattacctcatggtagaataaagcctgtaacccgcataaatgctggatttgtagaatagtagccgtatttccgaccatcccccaccgtgacccgcatccaacacgatcaatggcataaaaaactcccgcatatctttttgtttcatgatatgcgggagttttcccttttagatattcttttgtctactttaaaagtcctgccgtcactttctgcgggatca

SEQ ID NO: 30762 - DNA, 109 bp, Unknown; identical to SEQ ID NO: 30726
  Description of Unknown: RightRegion for integrase B4763 sequence

SEQ ID NO: 30763 - DNA, 260 bp, Unknown
  Description of Unknown: RightRegion for integrase B4764 sequence
acccgatgggataccagcaagccaaccttggagattcacttgaaagattttcaaaactgaccataacagacaacatcatgccgcagattcctctgtgccgatatcgctcagcagcgcctgaagacgagcatccggcatggtgtatcgctgtgacagatagcgcagcgccgcagccatctctccatccggaccgcccagctgtgagatgatcaccgctgctgccttcgcgtccggacatgtgatgttcaccggaaactgca

SEQ ID NO: 30764 - DNA, 260 bp, Unknown
  Description of Unknown: RightRegion for integrase B4765 sequence
tacgaactaaacaagctgattttccacgaaagatacttctgtatccgcattgctgtatgattatagcccgccgagcacatgcccgacgggcttttcttttgagccttccggtaaaagccgattggtttgaagcaaatttatgatatatgttggcacaagatatcagttgtttgcaatccggagggccgttaaattgtttgcggctttagccgctggtggggactacaggatttgaacctgtgacgagacggttatgagcc

SEQ ID NO: 30765 - DNA, 109 bp, Unknown; identical to SEQ ID NO: 30726
  Description of Unknown: RightRegion for integrase B4766 sequence

SEQ ID NO: 30766 - DNA, 109 bp, Unknown; identical to SEQ ID NO: 30726
  Description of Unknown: RightRegion for integrase B4767 sequence

SEQ ID NO: 30767 - DNA, 260 bp, Unknown
  Description of Unknown: RightRegion for integrase B4768 sequence
aacatatttgtaaacaaggattggttcacaatagttttcgacataaaagagataggctagtgcctatctcttttttcttacgctccgaaacccttgatatataaggctttcagaccctcgccgtttatttgcgttttaaggcggttgtttttgccttgtggacatattataccttgaattttgttctaggctgtccgtttccacatgtttacaccgatgtaaggctgataatttgcgttattattcccttctatgttacc

SEQ ID NO: 30768 - DNA, 260 bp, Unknown
  Description of Unknown: RightRegion for integrase B4769 sequence
atctgcggatgctgcttttttccgaaatcgcgcggcacaagcagccgctttcatatgtgaatatcactgccaccgggtaggaatgcaattcgcattcgtttgtacatcgttaggtctgagaagatgtgcatgcgaatgcttatttttttggaggttgtatgaaaaaaattgaaggactgcaccgctatttcaccaagggcgagcgagcgctgtggtttggttccgtatttgtgatcattgcggctttttattttttcgac

SEQ ID NO: 30769 - DNA, 260 bp, Unknown
  Description of Unknown: RightRegion for integrase B4770 sequence
ggtcatctgaatgagcctaactttgaattgaccataaagcccagaattccgcgcaaataaaggttttttcgttatttccaaaagaaacgggattattcttctgtaccaatatcagtcagtattcctgttacctctttatatggcatcgtatatcgctgtgaaagataacgcatagatgcagctaattcgccatccggcccaccgaactgacttataatgatcttcgccagtttcggattcgtctgggttatcttcacagg

SEQ ID NO: 30770 - DNA, 260 bp, Unknown
  Description of Unknown: RightRegion for integrase B4771 sequence
cggaaccgtaacggtatgagcgtatatacttttactattgctataaatttggcagcttaattactatactaaaaggcaggattcgctcctgccttttctgtttcccttgttaattttttatcgctacatacaatgcacacccagcaataacgtaagctatattacgctgtcttttaatttgttttcgctttaggttgaactctttttctaactgagccaaggattgattcgcattctgcaataagctctcctgctctttc

SEQ ID NO: 30771 - DNA, 260 bp, Unknown
  Description of Unknown: RightRegion for integrase B4772 sequence
atctgcggatgctgcttttttccgaaattgcgcggcacaagcagccgctttcatatgtgaatatcactgccaccgggtaggaatgcaattcgcattcgtttgtacatcgttaggtctgagaagatgtgcatgcgaatgcttatttttttggaggttgtatgaaaaaaattgaagaactgcgccgctatttcaccaagggcgagcgagcgctgtggtttggttccgtatttgtgatcattgcggctttttattttttcgac

SEQ ID NO: 30772 - DNA, 260 bp, Unknown
  Description of Unknown: RightRegion for integrase B4773 sequence
gtaaatccgaactttataatcttcaatttgcttctaatccaaacaaaaaggcacagatagtccaattaagggccgtctgtgccttttctttttgtctactacgccagttctgttttgggacgttatggttatataccctctggcaaaaatcaagagcggaactgcccacaggcaatgccgctctctacaaaggccggggcctttcaattcaaaagaaaggtagcagacccgaaagcctgctacctcagaatcaggtctta

SEQ ID NO: 30773 - DNA, 260 bp, Unknown
  Description of Unknown: RightRegion for integrase B4774 sequence
attgtgttctacaaggatacaaatacccttgaattccactattacctcatggtagaatgaatcctgtaacccgcataaatgctggatttatagaatagtagctgtatttccggccatcccccaccgtgacccgcatccaacacgatcaatggcataaaaaactcccgcatatctttttgtttcatgatatgcgggagttttcccttttagatattcttttgtctactttaaaagtcctgccgtcactttctgcggaatca

SEQ ID NO: 30774 - DNA, 260 bp, Unknown; identical to SEQ ID NO: 30736
  Description of Unknown: RightRegion for integrase B4775 sequence

SEQ ID NO: 30775 - DNA, 77 bp, Unknown
  Description of Unknown: RightRegion for integrase B4776 sequence
agttgttcgactgggaatcatctggtccgagtggcgagaatcgaactcacggcctcttgaaccccattgtgcttctc

SEQ ID NO: 30776 - DNA, 260 bp, Unknown
  Description of Unknown: RightRegion for integrase B4777 sequence
gtgaccttactgaataggaatgagagcaacgtttgcaaagctctgttctacgtcatttaagcagagtttctgttgagtgaccattcagaaggcactttaatttttttgccttgaaatagtaaatatagggtgtttaaaactcccgtagcttatgaactgaaaaagttcgtgagttacgggagttttttgcgtatatcctcacttttaaagcaatgtgcattttgacgaaatttcgagatgaaaagtgtataatttaacaa

SEQ ID NO: 30777 - DNA, 260 bp, Unknown; identical to SEQ ID NO: 30764
  Description of Unknown: RightRegion for integrase B4778 sequence

SEQ ID NO: 30778 - DNA, 260 bp, Unknown
  Description of Unknown: RightRegion for integrase B4779 sequence
cgaaagcaaccgatttttttctttgcttcttgcagaaggacgagaataggacggcagtgaataccgtgccctttggcacggtagagccgtcctgaccgacgagcgtcgagcgaggagaaagagtccttctgcccctgccaaaaaggtcggttgcgaaagcaaccgattttttttgctctttgcagaaggacatttttccaattccagttttttcaaaatgcgcaactaaattcagttgcatttctatctttttgtgctat

SEQ ID NO: 30779 - DNA, 109 bp, Unknown
  Description of Unknown: RightRegion for integrase B4780 sequence
tttattgaaaagatcatttttaccgcaaaagacgatgtacagattaaatatactgtatgagcttctttttgctctatcaaaaaagcccgtttttgcgggcttttttaag

SEQ ID NO: 30780 - DNA, 260 bp, Unknown
  Description of Unknown: RightRegion for integrase B4781 sequence
atcgtgttctacaaggatacaaatacccttgaattccactattacctcatggtagaataaatcctgtaacccgcataaatactggggttatagaatagtagccgtatttccgaccatcccccaccatgccccgcatccaatacaatcaatgacataaaaaaactcccgcatatccttttgtttcatgatatgcgggagtttccccatttagatattttttgcttactttaaaattgctgccgtcacttcctgcggaatca

SEQ ID NO: 30781 - DNA, 260 bp, Unknown
  Description of Unknown: RightRegion for integrase B4782 sequence
tccgacgcccgaaatccccgctccgttctgccgtctgtacgacgagcagggcagcgatgaggaagactggttcgcggccgcaagcttctcgccccgttctgacaatgatggcagcaagcatcctgtgtttgtggacgacggtttcggaaagcctgtcccggcatccgatgtcatccagaaccgtgacggagagttttcttcccggtgctcgaccagcaaggaactgtttgacttcaatgtcgaggtcgctcagaatcgct

SEQ ID NO: 30782 - DNA, 260 bp, Unknown
  Description of Unknown: RightRegion for integrase B4783 sequence
ggtcatctgaatgagcctaactttgaattgaccataaagcccagaattccgcgcaaataaagggtttttcgttatttccaaaagaaacgggattattcttctgtaccaatatcagtcagtattcctgttacctctttatatggcatcgtatatcgctgtgaaagataacgcatagatgcagccaattcgccatccggtccaccgaactgacttataatgatcttcgccagtttcggattcgtctgggttatcttcacagg

SEQ ID NO: 30783 - DNA, 109 bp, Unknown; identical to SEQ ID NO: 30748
  Description of Unknown: RightRegion for integrase B4784 sequence

SEQ ID NO: 30784 - DNA, 260 bp, Unknown
  Description of Unknown: RightRegion for integrase B4785 sequence
atttgtgtggatcgggagaccaagaagggtttccgccaggaaaggagcataaaaaaatgaaacagatcaccatagatattgaaacggcatctgacgagaatatcaaagactgcggtgtataccgttatgcagagtcggagtgtttcgacttgctgctgatctcttacgctgtggacaatggtccggtagcaacctgtgacattgccaacggtgaaacattgccggacgatgttcggaatgcactcacagacaagactgtc

SEQ ID NO: 30785 - DNA, 76 bp, Unknown; identical to SEQ ID NO: 30753
  Description of Unknown: RightRegion for integrase B4786 sequence

SEQ ID NO: 30786 - DNA, 260 bp, Unknown
  Description of Unknown: RightRegion for integrase B4787 sequence
tttattgaacagattattttttatgatcgagacaatgtgcagatccgatataaaatgtgatatcggcaatgtgcagatccgatataaagccccagttttaggttattgcaaaggtgtttgattctgcgtcatgtgtagacagtttggattggaaggattacggcgtagattctattcttcataccgttttagatcataagcatctcggaaacggttccatcattctctgtcataacggtgctaaatatactgccgaggct

SEQ ID NO: 30787 - DNA, 260 bp, Unknown; identical to SEQ ID NO: 30686
  Description of Unknown: RightRegion for integrase B4788 sequence

SEQ ID NO: 30788 - DNA, 260 bp, Unknown
  Description of Unknown: RightRegion for integrase B4789 sequence
tcatgtagattgccacttatcttacaatttaaaatcccgcttatcaaaaaagcaatatgagtcacaaaattaaaaagagcgatatcattaccgctcttttttgcatgttactctttatctacgtcattttttctcacgacgtccatatcgagcgtgactgttccgattagatctttcgtcacgcaaaacttatgctttgataccatgcagcctttaaactcctcgtcgtaccacacgatctctatcgtatcgttagagat

SEQ ID NO: 30789 - DNA, 260 bp, Unknown
  Description of Unknown: RightRegion for integrase B4790 sequence
gcagaaaagggaaaagggttcgtatgctgcttgccatgctccacggatggtcaaggttgaaaagccttgaccttttcttttgcttacaaacatcccgcaaaagccgactggacggaggatttttcccctgcccggtcgggttctgtttgcgaatactgttggcgactgaaacgctgccgggacgcggacagcgattttttaccccgaaccagcattcacgcatcacaaacctattgaaagcgaacgaatgcggctgcaca

SEQ ID NO: 30790 - DNA, 109 bp, Unknown; identical to SEQ ID NO: 30759
  Description of Unknown: RightRegion for integrase B4791 sequence

SEQ ID NO: 30791 - DNA, 260 bp, Unknown
  Description of Unknown: RightRegion for integrase B4792 sequence
gaaagttcgtctgagatgcgtctggtccgagtggcgagaatcgaactcacggcctcttgaaccccattgtgcttctctcgaaaacacaatgtacaatccgatactgcctagactcagtattgttaaatctcaaatgtattataccattctgtttcattggatgtcaagacgtttcattccttttgtggtcaaattgtggtcaaacgaccccgacaaatgacttttctcccccagctaagttacatcgcgcaatttcgatt

SEQ ID NO: 30792 - DNA, 260 bp, Unknown
  Description of Unknown: RightRegion for integrase B4793 sequence
agttgttcgactgggaatcatctggtccgagtggcgagaatcgaactcacggcctcttgaaccccattgtgcttctatcgagaacacaatgtacgatctgatactatctggactcagtatcgttaaatttcaaatgcattataccattctgtttcattggatgtcaagacgtttcattccttttgtggtcaaattgtggtcaaacgacactgacaaatgacctttctcccccggctaagttacatcgcgcaatttcgatt

SEQ ID NO: 30793 - DNA, 109 bp, Unknown; identical to SEQ ID NO: 30751
  Description of Unknown: RightRegion for integrase B4794 sequence

SEQ ID NO: 30794 - DNA, 81 bp, Unknown
  Description of Unknown: RightRegion for integrase B4795 sequence
gcttcaagttcggatagcgtagagtatggtactcccgaccagagtcgaactggtgactaacccttaggaggggtttattat

SEQ ID NO: 30795 - DNA, 260 bp, Unknown
  Description of Unknown: RightRegion for integrase B4796 sequence
atcgtgttctataaggatacaaatacccttgaattccactattatctcatggtagactaatctctgtaagccgcgtaaatgctggctttacagaatagtagctgtatttccgaccatcccccaccatgccccgcatccaatacaatcaatgacataaaaaaactcccgcatatccttttgtttcatgatatgcgggagtttccccatttagatattttttgcttactttaaaattgctgccgtcacttcctgcggaatca

SEQ ID NO: 30796 - DNA, 260 bp, Unknown
  Description of Unknown: RightRegion for integrase B4797 sequence
attgtgttctacaaggatacaaatacccttgaatttcactattacctcatggtagaatgaatcctataacccgcataaacactggggttatagaatagtagctgtatttccggtcatcccccaccatgccccgcatccaatacgatcaatggcataaaaaagctcccgcatatccttttgtttcatgatatgcgggagtttccccatttagatattttttgcttactttaaaattgctgccgtcacttcctgcggaatta

SEQ ID NO: 30797 - DNA, 260 bp, Unknown
  Description of Unknown: RightRegion for integrase B4798 sequence
gagtgttcggataaagcttttctggtgcaccaaaaaaacaaaaagaagttgtcgcattaagctaaaatgcttaatgtgacaacttctttttattttacagtgaaaagtttgattttcttctttttaagaacgaacatcggcctgttccccctattttcacggcttccagaaaaatcgtgattcgcatgagcttcaacatgccctttatcaatatgatactggatcacgtccgccagcaaaactatgacatcgctatcgaa

SEQ ID NO: 30798 - DNA, 260 bp, Unknown; identical to SEQ ID NO: 30690
  Description of Unknown: RightRegion for integrase B4799 sequence

SEQ ID NO: 30799 - DNA, 75 bp, Unknown
  Description of Unknown: RightRegion for integrase B4800 sequence
agttgttcgactgggaatcatctggtccgagtggcgagaatcgaactcacggcctcttgaaccccattcaagcgc

SEQ ID NO: 30800 - DNA, 260 bp, Unknown
  Description of Unknown: RightRegion for integrase B4801 sequence
aagatcgtgttctataaagacacaaacacgctggaattccactattatctcatgatataataagtgctaaaacccgcataaatactgacgttgtgtaattgtagctgtatttcatatcacggtccaccatgccccgcatccaatacgatcaatgacataaaaaactcccacatatccttttgtttcatgatatgcgggagtttccccatttagatatttttgcttactttaaaattgctgccgtcacttcctgcggaatt

SEQ ID NO: 30801 - DNA, 260 bp, Unknown
  Description of Unknown: RightRegion for integrase B4802 sequence
tttttatataatcaaacaagacttgaacttgcggctcgtcaaaagaaaattcgtgtttgaataaattttcttataagtgattattctttgaaaatttatagtaaacacttcattcctttttccttttccccaacaagttttgcaacttgccggggaacccggattgcaaattcggcgacctaaggagtaacgaatttgggagaaacagttcagtgaactgtttcgtagaaggctagttcagttctgtgcacctcgaccaa

SEQ ID NO: 30802 - DNA, 109 bp, Unknown
  Description of Unknown: RightRegion for integrase B4803 sequence
atcgtgttctataaggatacaaatacccttgaattccactattatctcatggtagactaatctctgtaagccgcgtaaatgctggctttacagaatagtagctgtattt

SEQ ID NO: 30803 - DNA, 260 bp, Unknown
  Description of Unknown: RightRegion for integrase B4804 sequence
tttgcggcattagatgagtgttcgtctaagctctcgttagctccaccagcaggggcttgaccctgcacccgatccgctttactttatgtaaggcggttttttattgtcgctcatggatcattatttataaacccaactttgttatttcaccatggcagacgctgatataataaaaaagagtgcattaccacctcagtgaaatgcactctcatattttaccctatttctcctccagcccgctgagcgaaagcctgctctcc

SEQ ID NO: 30804 - DNA, 77 bp, Unknown; identical to SEQ ID NO: 30718
  Description of Unknown: RightRegion for integrase B4805 sequence

SEQ ID NO: 30805 - DNA, 260 bp, Unknown; identical to SEQ ID NO: 30686
  Description of Unknown: RightRegion for integrase B4806 sequence

SEQ ID NO: 30806 - DNA, 260 bp, Unknown; identical to SEQ ID NO: 30736
  Description of Unknown: RightRegion for integrase B4807 sequence

SEQ ID NO: 30807 - DNA, 260 bp, Unknown
  Description of Unknown: RightRegion for integrase B4808 sequence
ggtcatctgaatgagcctaactttgaattgaccataaagcccagaatcccgcgcaaataaagggttttttgttatttccaaaagaaacgggattattcttctgtaccaatatcagtcagtattcctgttacctctttatatggcatcgtatatcgctgtgaaagataacgcatagatgcagccaattcgccatccggtccaccgaactgactaataataattttcgccagtttcggattcgtctgggttatcttcacagg

SEQ ID NO: 30808 - DNA, 260 bp, Unknown
  Description of Unknown: RightRegion for integrase B4809 sequence
cgaaagcagccgatttttttattcgcttcttgcagaaggacgagaataggacggcagtgaataccgtgccctttggcacggtagagccgtcctgaccgacgagcgtcgagcgaggagaaagagtccttctgcccctgccaaaaaggtcggttgcataagcagccgattttttttgctctttgcagaaggacatttttccaattccagttttttcaaaatgcgcaactaaattcagttgcatttttatctttttgtgctat

SEQ ID NO: 30809 - DNA, 260 bp, Unknown
  Description of Unknown: RightRegion for integrase B4810 sequence
ataaaagacccgattacatatcccacaccggtaaataaagtaattgatcctgcagactgattaaatactgccgccaggccaccgccgtctgctgccgctgttaccatggaatatacccccaggatcacaatcagcggtacggaaatcgtacttacaatctccagcgctttcattcctgttgctgcggtaatggtcatcagaagacctgccacgatcgtcagaacccatttattgattcccagtaattctgcagttggaat

SEQ ID NO: 30810 - DNA, 260 bp, Unknown
  Description of Unknown: RightRegion for integrase B4811 sequence
cacgaactaaataacctcattttctttgacaaatacttctgtatccgcattgctgtatgatgatagcccgccgagcgcatgctcgacgggcttttctttttagccttctgggaaaagccgattggttagaaacaaatttatgatatatgttggcacaagatatcagttgtttgcgtcccggaaggctgttagattgtctgcggctttgctgaaagcagccgctggtggggactacagggtttgaacctgtacctagacgg

SEQ ID NO: 30811 - DNA, 260 bp, Unknown
  Description of Unknown: RightRegion for integrase B4812 sequence
cggaaccgtgacggtatgagcgtatatacttttactattgctataaatttagcagcttaattactatactaaaaggcaggattcgctcctgcctttttttatgttcgcaccaatatggcaattaaagttgttatgatatacccagttctttgcagcgcacgacgtttagatgtctttcgctctttcgcgattgactgcttcaacgtctcgtataattcgctggttctcttgagcgagctttctgctttcgctaatgagtt

SEQ ID NO: 30812 - DNA, 260 bp, Unknown
  Description of Unknown: RightRegion for integrase B4813 sequence
attgtgttctacaaggatacaaatacccttgaattccactattacctcatggtagaatgaatcctgtaacccgcataaacactggggttatagaatagtagctgtatttccgaccatcccccaccatgccccgcatccaatacgatcaatggcataaaaaagctcccgcatatccttttgtttcatgatatgcgggagcttccccatttagatatttattttaaaagtgctgccgtcacttcctgagggattacaaattc

SEQ ID NO: 30813 - DNA, 260 bp, Unknown
  Description of Unknown: RightRegion for integrase B4814 sequence
caaaagcagccgatttttttattcgcttcttgcagaaggacgagaataggacggcagtgaataccgtgccctttggcacggtagagccgtcctgaccgacgagcgtcgagcgaggagaaagagtccttctgcccctgccaaaaaggtcggttgcaaaagcagccgattttttttgctctttgcagaaggacatttttccaattccagttttttcaaaatgtgcaactaaattcagttgcatttttatctttttgtgctat

SEQ ID NO: 30814 - DNA, 109 bp, Unknown
  Description of Unknown: RightRegion for integrase B4815 sequence
gatggtggcaccgcagataatttcacgctctacctatacccgaaaatctcccataaataaaggcttttttgacggataacttttatgtacgcattcttccgttccgata

SEQ ID NO: 30815 - DNA, 260 bp, Unknown
  Description of Unknown: RightRegion for integrase B4816 sequence
gcgaaccttttcaaatatgtaaatcacagatatccacttcgactgatcatgcctctataatacacaagagcctaccattatggataggctcttattttataattcaaacgtgctgcgaactaattcagaaacactcatatctttgctctgtgcaacttccttcaatttggtatattccgcatcattgagagatatcactctctgctttctgcgattttccacacctactgtgataggcgctccggccccttcacgatttc

SEQ ID NO: 30816 - DNA, 260 bp, Unknown
  Description of Unknown: RightRegion for integrase B4817 sequence
tatttgcagattaaccgcaattggtttgcggtcataggcaacctgcaaaataccagatagacggcttgcgtatttgccctgtaacgcacgaaaacggggcaccccttatcagggtgccccgtttgaacgtcagattttgagccgttgacccggatagatgatattcgggttcgtgatgccgtttttggcggcaatcttctgataggtcgtgccgaacttagccgcaatgcctgaaagcgtgtcaccagatttgacggtgt

SEQ ID NO: 30817 - DNA, 260 bp, Unknown
  Description of Unknown: RightRegion for integrase B4818 sequence
cgttttgaagacgggaaggagttcggatgccgtgcgtctcgctccaccaacacaatataatccgaaccccttgccgattggccgtgggttcggatttattgttttgtccgccgtcccggcataattttccccgccgccgcataatagacaggggaggggaacgctatgaagcctgctgtttatctgtacggtgtgccgggtcaatatgaaaactatctggcggcactggagagcgccggggtccgggtgatcctgtgccg

SEQ ID NO: 30818 - DNA, 109 bp, Unknown
  Description of Unknown: RightRegion for integrase B4819 sequence
gatggcggcaccgcagataatttcacgctctacctatacccgaaaatctcccataaataaaggcttttttgacggataacttttatgtacgcattcttccgttccgata

SEQ ID NO: 30819 - DNA, 260 bp, Unknown
  Description of Unknown: RightRegion for integrase B4820 sequence
aaccaccgggataaaatattacttataggccaacaacttccaaatttgttaactttttaaaaatatcaatttattcacaaagttccaattcctgccttaatttatcgattcgcccgatccactcccaggtgttcggaaattccgaatagctggctttttcaagctccgccgccacagcagcgccagccacaggataagttggacaattttcataagacacctgcctgcatgagactaagcaactcagcacggccggcatt

SEQ ID NO: 30820 - DNA, 260 bp, Unknown
  Description of Unknown: RightRegion for integrase B4821 sequence
aaaaacatcacgtttaggctgataaatggcttggagcttggaggtgacttcgatggctaaaaatcgctatctgccctttggctatatgatacgcaacggcgagatcgtcattaatgagcaggaggccgcgctcgtccgtaccgcctttgaggaatatatgacaggcgcatcctacgccgctgttgcggaaacgctccaagccacgggcatacgttatcattcggatacgcctttgtggaacaagcacatggtcaagagga

SEQ ID NO: 30821 - DNA, 260 bp, Unknown
  Description of Unknown: RightRegion for integrase B4822 sequence
atgtgtgatgtcgcaacttttgaacttaccctatatccaaaaatccctatgaaatcctaactttttgtttgtttatattaccgataacatcatggtactaacgaacttgctcatatggaaatgatctgcgcaatcgtataccaactgacgaaagatctgactccggaacagatcaaagaatctggctttgacaaatattatgtcgaccatactctcgcactctggcctcagtctgccggaggaacaccttggactgcaac

SEQ ID NO: 30822 - DNA, 260 bp, Unknown
  Description of Unknown: RightRegion for integrase B4823 sequence
acgcacgaagaagcgaagagtcatgtaccgtttagaatgtcagtaaaattgaggatttaattttttaccaaaaatacatatatcatcatggtttatatgaaacaaaaccacgatgatatatatttatttacccccatttttaacacaaaaaatcccgcccggaattaaccggacgggttttctgcttacttttcctccttgacttttctaattgtgagcgtatcgtccaccatatccagctctatgctcctgtcctcggg

SEQ ID NO: 30823 - DNA, 260 bp, Unknown
  Description of Unknown: RightRegion for integrase B4824 sequence
atgtgtgatgtcgcaacttttgagcttaccctatatccaaaagtccctatgaaatcctaactttttgtttgtttatattaccgataacatcatggtactaacgagcttgctcatatggaaatgatctgcgcaatcgtataccaactgacgaaagatctgactccggaacagatcaaagaatctggctttgacaaatattatgtcgaccatactctcgcactctggcctcagtctgccggaggaacaccttggactgcaac

SEQ ID NO: 30824 - DNA, 260 bp, Unknown
  Description of Unknown: RightRegion for integrase B4825 sequence
acatctggtagcagtgcccccgcaaatttcgttttggatgttttcccgcgtctcaagtgagatgggggttatcatagtgtcgagtatggatattcgatacaaagatacccccacaccaaaagccctgccggatggcagggctttcctttattttttgacgatatcccgatagtagacttccgtcttgtcgtcccgtgcgtccttgtcgttcagccacgcttttgccagctcggcaaaaaagtcgggcgttttgacgccaa

SEQ ID NO: 30825 - DNA, 260 bp, Unknown; identical to SEQ ID NO: 30483
  Description of Unknown: RightRegion for integrase B4826 sequence

SEQ ID NO: 30826 - DNA, 260 bp, Unknown
  Description of Unknown: RightRegion for integrase B4827 sequence
atgtatgatgtcgcagcttttgagcttacactgtacccgaaaatcccttcgaaatcctagttttttgtttgtttatattactgataacatcacggtactgacgagcttgctcatatggaaatgatctgcgcaatcgtataccaactgacgaaagatctgactccggaacagatcaaagaatctggctttgacaaatattatgtcgaccatactctcgcactctggcctcagtctgccggaggaacaccttggactgcaac

SEQ ID NO: 30827 - DNA, 96 bp, Unknown
  Description of Unknown: RightRegion for integrase B4828 sequence
cgttttgaagacggggaggagttcggatgccgtgcgtctcgctccaccaacacaatataatccgaaccctttgccgattggccgtgggttcggatt

SEQ ID NO: 30828 - DNA, 260 bp, Unknown
  Description of Unknown: RightRegion for integrase B4829 sequence
atgtgtgatgttgcaacttttgagcttacactgtacccgaaaatcccttcgaaatcctagtttttgtttgtttatattgctgataacatcacggtactgacgaacttgctcatatggaaatgatctgcgcaatcatataccaactgacgaaagatctgactccggaacagatcaaagaatctggctttgacaaatattatgtcgaccatactctcgcactctggcctcagtctgccggaggaacaccttggactgcaact

SEQ ID NO: 30829 - DNA, 260 bp, Unknown
  Description of Unknown: RightRegion for integrase B4830 sequence
atgtatgatgtcgcaacttttgagcttacactgtacccgaaaatcccttcgaaatcctagttttttgtttgtttatattactgataacatcacggcactaacgaacttgctcatatggaaatgatctgcgcaatcgtataccaactgacgaaagatctgactccggaacagatcaaagaatctggctttgacaaatattatgttgaccatactctcgcactctggcctcagtctgccggaggaacaccttggactgcaac

SEQ ID NO: 30830 - DNA, 260 bp, Unknown
  Description of Unknown: RightRegion for integrase B4831 sequence
tctggtccactggaactaaacaaaataacgttgtgtttacttgaatttttattaatataatccgacgcaacgtgtgagcacctaccgacagtcaggctagtgatagtctggctgttttattttttatttaattattttatatatgtaggaggaattatttatgtttcaatatatctggccggttatattagttgtgttttcaaatactgtatatcaggtatgtacaaagggagttcctgaaaatatgaacccatttgctt

SEQ ID NO: 30831 - DNA, 260 bp, Unknown
  Description of Unknown: RightRegion for integrase B4832 sequence
ggattcaagctgaaatgcggactgactttgaaggaggaattatgtacggatacaaaatagaaaacgggacaatcgttgttgtagaagatgaggcggctatcatccgcagcattttcaagaattatctgtctggtatgagtatgcgaaaggcagcagatgcaactgaggttgattttccgcatagcaccgtgaaaaagatcatcaggcaaaaacggtatatcgggaacgaattctatcctgcgattatcgaaaaggatgta

SEQ ID NO: 30832 - DNA, 260 bp, Unknown
  Description of Unknown: RightRegion for integrase B4833 sequence
gatggaggcactgcagataatttcacgctttacctatacccgaaaatctcccataaataaaggcttttttgacggataacttttatgtacgcattcttccgttccgatatccgttaacatcgcacgtacactgtcatacggcatggcatagcgctgattcagataacgcattgaggcagccagttctccatccggaccgccaatctgcgaaattacgatttttgcgaaagcaggatccggttttctgatattcaccggaa

SEQ ID NO: 30833 - DNA, 260 bp, Unknown
  Description of Unknown: RightRegion for integrase B4834 sequence
gacaagctcagcatggtcgaaatcacggtccacccgtttgatgcatcattgagcaaatgatacatattgcgctcaatgatacaccaatgaaaaggcccggcaaaagccgggctcttattacttatactcctctaccatcgcgcggacccgcgcggtcttggcctgaagcatagccagatcatccgaccagctttccagcttgccgcgctcgcgctcggtggtagtctcggcggcctcgcacttggcgatcttatcagcca

SEQ ID NO: 30834 - DNA, 109 bp, Unknown
  Description of Unknown: RightRegion for integrase B4835 sequence
atgtgtgatgttgcaacttttgagcttacactgtacccgaaaatcccttcgaaatcctagtttttgtttgtttatattgctgataacatcacggtactgacgagcttgc

SEQ ID NO: 30835 - DNA, 77 bp, Unknown
  Description of Unknown: RightRegion for integrase B4836 sequence
aagttcgtacaccgtgcgtcatgctccaccagaaccaaaacactacacggaaacgtgtagtgtttttttcgttaagg

SEQ ID NO: 30836 - DNA, 260 bp, Unknown
  Description of Unknown: RightRegion for integrase B4837 sequence
gaaaaagagcaaagaaatgaccaatttactctaactttgtttccaaagctgcctaaatagacaaaccctatacttatgtatttttcaatatgtacccttgaagatagataaaccgttaagggtaattcattgccttctttatctactcctataggctcttgtaatgatacctctattttggattttttattagcccttatagtcatcaatatttcattggcaatagtatcactacggaaacatttaatcacaatcaaaat

SEQ ID NO: 30837 - DNA, 260 bp, Unknown
  Description of Unknown: RightRegion for integrase B4838 sequence
gatggcggcaccgcagataatttcacgctctacctatacccgaaaatctcccataaataaaggcttttttgacggataacttttatgtacgcattcttccgttccgatatccgttaacatcgcacgtacactgtcatacggcatggcatagcgctgattcagataacgcatagaggcagccagttccccatccggaccgccaatctgcgaaattacgatttttgcgaaagcaggatccggttttctgatattcaccggaa

SEQ ID NO: 30838 - DNA, 260 bp, Unknown
  Description of Unknown: RightRegion for integrase B4839 sequence
ctatcatctccaccacaaaggtacggtagcaatgatacaaattgctaccgtactttttaattattccatatgaaaatcccttgatataaagccaaaagcgaggttagtgggttcaaatgtgaacctgccgacctcgcttttttcgtttatggagtttctggcaaacgctacctcaggaaaaagtgaacccactctgccgaaccttttaatttttcatagaataattaaaaggtttaatccaccgtagcgttgtcctcaat

SEQ ID NO: 30839 - DNA, 109 bp, Unknown
  Description of Unknown: RightRegion for integrase B4840 sequence
atgtatgatgtcgcaacttttgagcttacactgtacccgaaaatcccttcgaaatcctagttttttgtttgtttatattactgataacatcacggcactaacgagcttg

SEQ ID NO: 30840 - DNA, 260 bp, Unknown
  Description of Unknown: RightRegion for integrase B4841 sequence
gggcataagctaccgcacgggcaacctgaatggagcttatacacaaaaacaaaaagataagcgggtgtaataatgaattgcattatatatgcaaaaaacgcaaacaacataaccgtttttgaacagcataatgtttgtgcagaaaaagccaaaagatacggctattccgttgcacatagaatttttgatataagaggggatagatttacagaagctataaacaaggtcattgcaaataatgatattgaaatcctgcttgt

SEQ ID NO: 30841 - DNA, 260 bp, Unknown
  Description of Unknown: RightRegion for integrase B4842 sequence
acgcacaaagaagcgaagagtcatgtaccgtttagaatgtcagtaaaattgaggatttaattttttaccaaaaatatatatatcatcatggtttatatgaagcaaaaccacgatgatatatatatttatttacccccatttttaacacaaaaaatcccgcccggaattaaccggacgggttttctgcttacttttcctccttgacttttctaattgtgagcgtatcgcccaccatatccagctctatgctcctgtcctcg

SEQ ID NO: 30842 - DNA, 260 bp, Unknown
  Description of Unknown: RightRegion for integrase B4843 sequence
gcgcccggctcttctggtggttcggatttaaaacgccccgctctgcgtctatgctgttgatataaacgcctgctgctttcaatacctcttttgtcttatcaagctgcgcctcaaaatcgcccttatggaaaagcgtaactctatacatttccctgcgctctttctcttcgtcgtctgcatttaccgcaggcgtacccagcagccgcagaaacgtataatatgcgtctggcttatcccgtccagtgtaaacgcctctctgg

SEQ ID NO: 30843 - DNA, 260 bp, Unknown
  Description of Unknown: RightRegion for integrase B4844 sequence
gaaggcgcggatttgtgttcagatttcgcgccgccttctccgccagaaaaagcaccttgaaacaggtgttttttcttttgcccttgacaagcagatgatgttatgatataatttgtaatacaagaagaaacaatttaatattcatgatttaacgttctgcaacggaggatacggtcatgacaccgaagttttattcaacctgtctcttgtccccgcattttctttcagtccgcttgattttactgatatatcgcgcataa

SEQ ID NO: 30844 - DNA, 260 bp, Unknown
  Description of Unknown: RightRegion for integrase B4845 sequence
acgaaccacttttatattgcacgatcaaggtacccgatacgattagttattacatattagatttattcttcatcaacacgatatgacattcttaaatgacttaacaattcatttacagtttcttcattaaatgttttaggctcaacaataggcccatcgccatattctgttatgtaaatatattgcattttatctgttggtttaaaatcagggtattcatcccttaaatcttcaaaatcatcactcaaccaatcttctaa

SEQ ID NO: 30845 - DNA, 109 bp, Unknown
  Description of Unknown: RightRegion for integrase B4846 sequence
gatggaggcactgcagataatttcacgctctacctatacccgaaaatctcccataaataaaggcttttttgacggacaacttttatgtacgcattcttccgttccgata

SEQ ID NO: 30846 - DNA, 260 bp, Unknown
  Description of Unknown: RightRegion for integrase B4847 sequence
aaaaggtcggttgcaaaagcagccgattttttttcgcttcttgcagaagggcgagaataggacggcagtgaataccgtgccctttggcacggtagagccgtcctgaccgacgagcgtcgagcgaggagaaagagtccttctgcccctgccaaaaaggtcggttgcaaaagcagccgatttttttctttgcttcttgcagaaggacatttttccaattccagttttttcaaaatgcgcaactaaattcagttgcatttcta

SEQ ID NO: 30847 - DNA, 260 bp, Unknown
  Description of Unknown: RightRegion for integrase B4848 sequence
atgtatgatgtcgcagcttttgagcttacactgtacccgaaaatcccttcgaaatcctagttttttgtttgtttatattactgataacatcacggtactgacgagcttgctcatatggagatgatctgcgcaatcatataccaactgacgaaagatctgactccggaacagatcaaagaatctggctttgacaaatattatgtcgaccatactctcgcactctggcctcagtctgccggaggaacaccttggactgcaac

SEQ ID NO: 30848 - DNA, 260 bp, Unknown
  Description of Unknown: RightRegion for integrase B4849 sequence
aaccaccgagataaaatattacttataggccaacaacttccatatttgttaactttttaaaaatatcaatttattcacaaagttccaattcctgccttaatttgtcgattcgcccgatccactcccaggtgttcggaaattccgaatagctggctttttcaagctccgccgccacagcagcgccagccacaggataagttggacaattttcataagacacctgcctgcatgagactaagcaactcagcacggccggcatt

SEQ ID NO: 30849 - DNA, 260 bp, Unknown
  Description of Unknown: RightRegion for integrase B4850 sequence
ggctgtgaatactcattgacccgaagcgtgggaagaaaattcctgcctatgccgcgataacctctactattctgacacccatgctgacacccatactctcatatatactccagggaaaacacgaacaagcattcatttaacatctataagagatagagccgaatacaaacgaaaatccctctcagaaagcattccaagagggattctgtatctctaccaacacataggtagagagcgtgatggtcgagatgaatcgtatc

SEQ ID NO: 30850 - DNA, 260 bp, Unknown
  Description of Unknown: RightRegion for integrase B4851 sequence
ccaaaaaaagccgcaatgttaattgcggctttttcctttatttgcctaagtataatctaagagattgacagggggaaggcctggcgtctataagattccgccttcttgaacacagcaaagcagtatttcatcacgctgttatcatggggcgttcccgaattggagaacatattaaatttcttcagtagctggcggaactcatggaaagtatattgactatcttgaattattgtagaagatcaaattatctcctgacattc

SEQ ID NO: 30851 - DNA, 260 bp, Unknown
  Description of Unknown: RightRegion for integrase B4852 sequence
atgtatgatgtcgcaacttttgagcttacactgtacccgaaaatcccttcgaaatcctagttttttgtttgtttatattactgataacatcacggcactaacgagcttgctcatatggaaatgatctgtgcaatcgtataccaactgacgaaagatctgactccggaacagatcaaagaatctggctttgacaaatattatgttgaccatactctcgcactctggcctcagtctgccggaggaacaccttggactgcaac

SEQ ID NO: 30852 - DNA, 260 bp, Unknown
  Description of Unknown: RightRegion for integrase B4853 sequence
attcgtcgcactgtaaagagatgcgtgttaaatgacaagaacctagaaatctctttctaggttctgcatatctttcttcttggtgtacccacctgccccatcatatcgtgccccagatggtttctccgataaccatagcttctggacaccccgaagtcgtcgtaatccgaatagggaaatgtcttcgcaattggacagtaagctttcagtccgtaatactttttccagacctttttatctgccccttccccagccggccg

SEQ ID NO: 30853 - DNA, 260 bp, Unknown
  Description of Unknown: RightRegion for integrase B4854 sequence
gatggaggcactgcagataatttcacgctttacctatacccgaaaatctcccataaataaaggctttttttgacggataacttttatgtacgcattcttccgttccgatatccgttaacatcgcacgtactctgtcatacggcatggcatagcgctgattcagataacgcatagaggcagccagttccccatccggaccgccaatctgcgaaattacgatttttgcgaaagcaggatccggttttctgatattcaccgga

SEQ ID NO: 30854 - DNA, 260 bp, Unknown
  Description of Unknown: RightRegion for integrase B4855 sequence
gcattccccaagttcgctttaagtagagatataagccgttacgatataaataaattatagcaaatattcacaaaataaaaagggcagggatttattcctgtcctcctttctctttttttaatatatccataacttctaaactatcttttagcatttgcaataattgttctttggttttaatcggtttagttattgtcgaatgaaaaatcattttatcatctttcacaatctcaaagttataaaacttctctccaaacata

SEQ ID NO: 30855 - DNA, 260 bp, Unknown
  Description of Unknown: RightRegion for integrase B4856 sequence
atgtgtgatgtcgcaacttttgaacttaccctatatccaaaaatccctatgaaatcctaactttttgtttgtttatattaccgataacatcatggtactaacgagcttgctcatatggaaatgatctgcgcaatcgtataccaactgacgaaagatctgactccggaacagatcaaagaatctggctttgacaaatattatgtcgaccatactctcgcactctggcctcagtctgccggaggaacaccttggactgcaac

SEQ ID NO: 30856 - DNA, 260 bp, Unknown
  Description of Unknown: RightRegion for integrase B4857 sequence
aatggggaaaccgacaaagataacatcatactgttccataacctcttgatctatatgtgaggaaagcggcgggcgagtaccattgtttagttcgtcctgcgctcggtcaaatacatcgtcctctgtatattccacttcggggataattctgaacagttcaccgcccgttttatcggaaatccagttcgcaacctgctgtgtattgcccgaccacgaaaaataggctaccaagatattagaatctcctgcggtactttctt

SEQ ID NO: 30857 - DNA, 260 bp, Unknown
  Description of Unknown: RightRegion for integrase B4858 sequence
gatggaggcactgcagataatttcacgctttacctatacccgaaaatctcccataaataaaggctttttttgacggataacttttatgtacgcattcttccgttccgatatccgttaacatcgcacgtacactgtcatacggcatggcatagcgctgattcagataacgcatagaggcagccagttccccatccggaccgccaatctgcgaaattacgatttttgcgaaagcaggatccggttttctgatattcaccgga

SEQ ID NO: 30858 - DNA, 109 bp, Unknown
  Description of Unknown: RightRegion for integrase B4859 sequence
atgtatgatgttgcaacttttgagcttacactgtacccgaaaatcccttcgaaatcctagtttttgtttgtttatattactgataacatcacggtactgacgagcttgc

SEQ ID NO: 30859 - DNA, 260 bp, Unknown
  Description of Unknown: RightRegion for integrase B4860 sequence
accgtagtcgtgttgtcaaccgcaatcgcaatgattgcccctttgcagaaggcttcctagctatttctttcggacgtattgcttcccctgccaagcaaggcagatccagccgctaggaatcattccccatggattgccggcagaatcgtactggatctgcatcaccgttaccgccgtccccgcattaagctgtccggcagagtttgagtgcttttgcccatcagcagttagctgcttctttgtttttcgggagtatcccg

SEQ ID NO: 30860 - DNA, 260 bp, Unknown
  Description of Unknown: RightRegion for integrase B4861 sequence
cgttttgaagacggggaggagttcggatgccgtgcgtctcgctccaccaaaacaatataatccgaaccttgtaccaattggtcatgggttcggatttattgttttaatggaagaaattgaagactggtaatggaaaagccgggaggactgccgattattgcaatcctcccggttcctttatgtagatgcactgtctgaaatctccttctttgctttccattcggcaaatgcctttttgccaccttcgctttcgtagtact

SEQ ID NO: 30861 - DNA, 260 bp, Unknown
  Description of Unknown: RightRegion for integrase B4862 sequence
gatggaggcaccgcagataatttcacgctttacctctacccgaaaatctcccataaataaaggctttttttgacggataacttttatgtacgcattcttccgttccgatatccgttaacatcgcacgtacactgtcatacggcatggcatagcgctgattcagataacgcatagaggcagccagttccccatccggaccgccaatctgcgaaattacgatttttgcgaaagcaggatccggttttctgatattcaccgga

SEQ ID NO: 30862 - DNA, 260 bp, Unknown
  Description of Unknown: RightRegion for integrase B4863 sequence
gggcataagctaccgcacgggcaacctgaatggagcttatacacaaaaacaaaaagataagcgggtgtaataatgaattgcattatatatgcaaaaaacgcaaacaacataaccgtttttgaacagcataatgtttgtgcagaaaaagccaaaagatacggttattccgttgcacatagaatttttgatataagaggggatagatttacagaagctataaacaaggtcattgcaaatgatgatattgaaatcctgcttat

SEQ ID NO: 30863 - DNA, 260 bp, Unknown
  Description of Unknown: RightRegion for integrase B4864 sequence
gggcataagctaccgcacgggcagcctgaatggagcttatacacaaaaacaaaaagataagcgggtgtaataatgaattgcattatatatgcaaaaaacgcaaacaacataaccgtttttgaacagcataatgtttgtgcagaaaaagccaaaagatacggttattccgttgcacatagaatttttgatataagaggggatagatttacagaagctataaacaaggtcattgcaaatgatgatattgaaatcctgctcgt

SEQ ID NO: 30864 - DNA, 260 bp, Unknown
  Description of Unknown: RightRegion for integrase B4865 sequence
atgtatgatgttgcaacttttgagcttacactgtacccgaaaatcccttcgaaatcctagtttttgtttgtttatattactgataacatcacggtactgacgaatgggtacataaaagttatcactcttataataggtaaatatagatgatacaatatattctttttcatcctcccctcattgtgaagggaggatatttttataccaatctaagttcgattgcttcaatttttttattcatcccgactgtgccaatcatg

SEQ ID NO: 30865 - DNA, 109 bp, Unknown
  Description of Unknown: RightRegion for integrase B4866 sequence
gatggtggcaccgcagataatttcacgctctacctatacccgaaaatctcccataaataaaggcttttttgacggataacttttatgtacgcattcctccgtaccaata

SEQ ID NO: 30866 - DNA, 260 bp, Unknown
  Description of Unknown: RightRegion for integrase B4867 sequence
ggctgtgaatactcattgacccgaagcatgggaagaaaattcctgcctatgccgcaataacctctactattctgacacccatactctcatatatactccagggaaaacacgaacaagcattcatttaacatctataagagatagagcaggatacaaacgaaaatccctctcggaaagcattccaagagggattctgtatctctaccaacacataggtagagagcgtgatggtcgagatgacaggattcgaacctgcgacc

SEQ ID NO: 30867 - DNA, 260 bp, Unknown
  Description of Unknown: RightRegion for integrase B4868 sequence
ccaaaatcgctggagttctgctccttgcaatcaatcacatatccaatgcgcttaaaatagctttgaatatttctccatgtagcaccaccgtttgcggacttgattcccataacattttcaaaaacaaacattttgggattatattttttgaggaaatccgcataaagcaaataaagactgtttcttggatcctgctccattggaatttccatatggcggctctgggcacgtccgactaaagagtatgcctgacaaggggg

SEQ ID NO: 30868 - DNA, 260 bp, Unknown
  Description of Unknown: RightRegion for integrase B4869 sequence
agcgacctccatctgacaatccaccccaaaattgctatacctcaaacctctaacatttaagttattgctgctgcgcgctgcatgaagtaccccgttcaatctgctcgtgcttcggcggtgacgatctcgtgctcagcaacgatggctatcagctgttcgtaaccctcggtcagttctcgatcatccggctcgagcgcgacatccagctgctcatgcccgcttacgacgtatgtctgccgcggcgcgactgctcgaacagc

SEQ ID NO: 30869 - DNA, 260 bp, Unknown
  Description of Unknown: RightRegion for integrase B4870 sequence
agcgacctccatctgacaatccaccccaaaattgctatacctcaaacctctaacatttaagttattgctgctgcgcgctgcatgaagtaccccgttcaatctgctcgtgcttcggcggtgacgatctcgtgctcagcaacgatggctatcagctgttcgtaaccctcggtcagttctcgatcatccggctcgagcgcgacattcagctgctcatgcccgcttacgacgtatgtctgccgcggcgcgactgctcgaacagc

SEQ ID NO: 30870 - DNA, 109 bp, Unknown
  Description of Unknown: RightRegion for integrase B4871 sequence
atccgctccatcgtaaagtcctgtgttttcgatggcgatcatctcgacgttactttttaacgtctttctacttttcgttctgattggggttccgacctgccccatcata

SEQ ID NO: 30871 - DNA, 260 bp, Unknown
  Description of Unknown: RightRegion for integrase B4872 sequence
tatttgcagattaaccgcaattggtttgcggtcataggcaacctgcaaaataccagataggcggcttgcgtatttgccctgtaacgcacgaaaacggggcaccccttatcagggtgccccgttttaacgtcagattttgagccgttgacccggatagatgatattcgggttcgtgatgccgtttttggcggcaatcttctgataagtcgtgccgaacttggccgcaatgcctgaaagcgtgtcaccagatttgacggtgt

SEQ ID NO: 30872 - DNA, 260 bp, Unknown
  Description of Unknown: RightRegion for integrase B4873 sequence
tcaagttcgactgagaagcgtctggtccgagtggcgagaatcgaactcacggcctcttgaaccccattgtgcttctctcgaaaacacaatgtacaatccgatactgcctagactcagtatcgttaaatttcaaatgcattataccattctgttttattggatgtcaagacgtttcattccttttgtggtcaaattgtggtcaagcaaccccgacaaatgacttttctcccccagctaagttacatcgcgcaatttcgatt

SEQ ID NO: 30873 - DNA, 260 bp, Unknown
  Description of Unknown: RightRegion for integrase B4874 sequence
gaaagttcgtctgggatgcgtctggtccgagtggcgagaatcgaactcacggcctcttgaaccccattgtgcttctctcaaaaacgcaatggacactccgataccacttgtacgcagtatcatcaaatttcaaaattattttatcattctgtttcgttagatgtcaagatgtttcgtttcttttgtggtcaaattgtggtcaaccgaccctgacaaatgaccattctcccctactaagttacatggcgcaattccgattt

SEQ ID NO: 30874 - DNA, 260 bp, Unknown; identical to SEQ ID NO: 30572
  Description of Unknown: RightRegion for integrase B4875 sequence

SEQ ID NO: 30875 - DNA, 171 bp, Unknown
  Description of Unknown: RightRegion for integrase B4876 sequence
ccgaacactttcttcttcgtgaagaacgtcttcgggtttgcgatagaggttacggtttaatccgtagcctcttttctatttcaggcaggaatcttcaagacctgaccgtcacgaatcatcgtacctgaaatgctgttgagagcggcgatctccgtccatctaccgcctctg

SEQ ID NO: 30876 - DNA, 260 bp, Unknown; identical to SEQ ID NO: 30555
  Description of Unknown: RightRegion for integrase B4877 sequence

SEQ ID NO: 30877 - DNA, 77 bp, Unknown
  Description of Unknown: RightRegion for integrase B4878 sequence
gaaagttcgtctgggatgcgtctggtccgagtggcgagaatcgaactcacggcctcttgaaccccattcaagcgcgc

SEQ ID NO: 30878 - DNA, 260 bp, Unknown
  Description of Unknown: RightRegion for integrase B4879 sequence
caatcgaacttcatcttctaccctgaagggttctcgtatatcgttcgtcgagtcgcttagtcgaattacacaatatctttccattgcttccctacttcttttctagcgacgggatttaaaatgaacccgtcttcgtttacctcgcaaccgatttcaaggacagtgccgtaaaatgcctgccgcatacttgcttcacgctttgcagcacgaaggcttgtagccttgagcttttccgtttgcctataactgccggcgttctg

SEQ ID NO: 30879 - DNA, 260 bp, Unknown
  Description of Unknown: RightRegion for integrase B4880 sequence
gaaagtgacctctccctcaccctccatcccgtggttttttctgcatccgctaaccgataacatcaatgtgcgggtgaacccgcccactaaagttatccataataaaagcgccgtcaaccgacggcgctttcgcattttcttatcagaatcccaatcctttcagcccgctaagccccttgagctgcttgagtccgctcgagccgcctcccgacttccccgagccgccgctcttcttgctcttgcttgccgccgtagacagc

SEQ ID NO: 30880 - DNA, 75 bp, Unknown
  Description of Unknown: RightRegion for integrase B4881 sequence
gaaagttcgtctgggatgcgtctggtccgagtggcgagaatcgaactcacggcctcttgaaccccattcaagcgc

SEQ ID NO: 30881 - DNA, 109 bp, Unknown; identical to SEQ ID NO: 30870
  Description of Unknown: RightRegion for integrase B4882 sequence

SEQ ID NO: 30882 - DNA, 109 bp, Unknown; identical to SEQ ID NO: 30870
  Description of Unknown: RightRegion for integrase B4883 sequence

SEQ ID NO: 30883 - DNA, 260 bp, Unknown
  Description of Unknown: RightRegion for integrase B4884 sequence
atccgttccatcgtaaaatcctgtgttttcgatggtgatcatcttgatgtgatgttttaacgcccatctacttttcattcagattggggttccgacctgccccatcatatcatgtcccagatgttgtctttgatatccatagcttcttgacaccccgaaatcatcataatcactgtactcaaacccttttgcgatcggtgaaaatgctttcagaccatacttttttacatatgacccatcttccttttcctggatctcat

SEQ ID NO: 30884 - DNA, 260 bp, Unknown
  Description of Unknown: RightRegion for integrase B4885 sequence
atccgctccatcgtaaagtcctgtgttttcgatggcgatcatctcgacgttactttttaacgtctttctacttttcgttctgattggggttccgacctgccccatcatatcatgtcccagatgttgtctttgatatccatagcttcttgacaccccgaaatcatcataatcactgtactcaaacccttttgcgatcggtgaaaatgctttcagaccatacttttttacatatgacccctcctccttttcctggatctcat

SEQ ID NO: 30885 - DNA, 260 bp, Unknown; identical to SEQ ID NO: 30871
  Description of Unknown: RightRegion for integrase B4886 sequence

SEQ ID NO: 30886 - DNA, 260 bp, Unknown
  Description of Unknown: RightRegion for integrase B4887 sequence
atccgctccatcgtaaagtcctgtgttttcgatggcgatcatctcgacgttactttttaacgtctttctacttttcgttctgattggggttccgacttgccccatcatatcatgtcccagatgctgtctctgatatccatagcttcttgacaccccgaaatcatcataatcactgtactcaaacccttttgcgatcggcgaaaatgctttcagaccatacttttttacatatgacccatcctccttttcctggatctcat

SEQ ID NO: 30887 - DNA, 160 bp, Unknown
  Description of Unknown: RightRegion for integrase B4888 sequence
tcaagtattatatggacaaaacaaggtgacaatattgatattaaagtaaattttctataggctcgtaacagccgaagattctgtgtttcgagtggagtaagttttaaacttgccattggtgccacgtgtagaactttccccatctgaagacacttgttac

SEQ ID NO: 30888 - DNA, 260 bp, Unknown; identical to SEQ ID NO: 30869
  Description of Unknown: RightRegion for integrase B4889 sequence

SEQ ID NO: 30889 - DNA, 260 bp, Unknown
  Description of Unknown: RightRegion for integrase B4890 sequence
tataacaattcattccggcagccgaatgttttcttttacgcgaaaataaacaggcaataaaaatgcgtgagcaaaggagaaaaaaccatgaattgtgtgatttacgcaaagaaaaatgatgatataagcgtgtacgaacaatacaatcaatgtgccacacttgcaaaacgatatggttattcaatcgtcggaaaagtccttgattttgacggaacgaaatttcatgaagcaataaataaagttatcgttgaacaagacgt

SEQ ID NO: 30890 - DNA, 260 bp, Unknown
  Description of Unknown: RightRegion for integrase B4891 sequence
gggcgcgaaatcaaagtctccaataactggttttgcataataacactgattcgtacatgaaaaccaaaaacagtcagcaaatgtgcttgttgtgtgtggtggtacccctataccttgtattatatagtggtacccctataataataagtgtcgaaaggcaataaggcttttcgaaagatagaaaggagcaaggcaatgagcatcacgttcaggatttggcgattcgcagtcaccgtccaaatccgcttccgccttcttaa

SEQ ID NO: 30891 - DNA, 260 bp, Unknown
  Description of Unknown: RightRegion for integrase B4892 sequence
atccgttccatcgtaaaatcctgtgttttcgatggtgatcatctcgatgtgatgttttaacgcccatctacttttcattcagattggggttccgacctgccccatcatatcatgtcccagatgctgtctctgatatccatagcttcttgacaccccgaaatcatcataatcactgtactcaaacccttttgcgatcggcgaaaatgctttcagaccatacttttttacatatgccccatcctccttttcctggatctcat

SEQ ID NO: 30892 - DNA, 99 bp, Unknown
  Description of Unknown: RightRegion for integrase B4893 sequence
gaaagttcgtctgggatgcgtctggtccgagtggcgagaatcgaactcacggcctcttgaaccccattcaagcgcgctaccaaaactgcgctacacccg

SEQ ID NO: 30893 - DNA, 260 bp, Unknown
  Description of Unknown: RightRegion for integrase B4894 sequence
atccgctccatcgtaaagtcctgtgttttcgatggcgatcatctcgacgttactttttaacgtctttctacttttcgttctgattggggttccgacctgccccatcatatcatgtcccagatgttgtctttgatatccatagcttcttgacaccccgaaatcatcataatcactgtactcaaatccttttgcgatcggtgaaaatgatttcagaccatacttttttacatatgacccatcctccttttcctggatctcat

SEQ ID NO: 30894 - DNA, 109 bp, Unknown
  Description of Unknown: RightRegion for integrase B4895 sequence
gaaagttctactgagatgcgtttggtccgagtggcgagaatcgaactcacggcctcttgaaccccattgtgcttctctcgaaaacacaatgtacaatccgatactgcct

SEQ ID NO: 30895 - DNA, 260 bp, Unknown; identical to SEQ ID NO: 30572
  Description of Unknown: RightRegion for integrase B4896 sequence

SEQ ID NO: 30896 - DNA, 260 bp, Unknown; identical to SEQ ID NO: 30893
  Description of Unknown: RightRegion for integrase B4897 sequence

SEQ ID NO: 30897 - DNA, 109 bp, Unknown; identical to SEQ ID NO: 30870
  Description of Unknown: RightRegion for integrase B4898 sequence

SEQ ID NO: 30898 - DNA, 260 bp, Unknown
  Description of Unknown: RightRegion for integrase B4899 sequence
gcaaatcagtcaaaatttgaaaacccaccatttaatgttgatattaagcttagactttaacttatatatacaacatcgatgtaccaattcataagcacattgatgttgtatattaaaacagcccccgaaggagctgttttttatttacacactatatattcataatatagtgatgttttatttttaactgcatctttatcatatatccaagcttctgtcatgtccgcccatgcgttcggtgtatcacctacaccgtattt

SEQ ID NO: 30899 - DNA, 109 bp, Unknown; identical to SEQ ID NO: 30870
  Description of Unknown: RightRegion for integrase B4900 sequence

SEQ ID NO: 30900 - DNA, 260 bp, Unknown
  Description of Unknown: RightRegion for integrase B4901 sequence
agcgacctccatctgacaatccaccccaaaatcgctatacctcaaacctctaacatttaagttattgctgctgcgctctgcacgaagtaccccgttcaatctgctcgtgcttcggcggtgacgatctcgtgctcagcaacgatggctatcagctgttcgtaaccctcggtcagttctcgatcatccggcttgagcgcgacatccagctgctcatgcccgcttacgacgtatgtctgccgcggcgcgactgctcgaacagc

SEQ ID NO: 30901 - DNA, 109 bp, Unknown; identical to SEQ ID NO: 30870
  Description of Unknown: RightRegion for integrase B4902 sequence

SEQ ID NO: 30902 - DNA, 260 bp, Unknown
  Description of Unknown: RightRegion for integrase B4903 sequence
ccggacaataaaaaaacagcggtcgaatgttcgaccgctgataaaaatggtggagcatagcggattcgaacctgtatgcgcttgtgaccggggaaggcaggctggaggactggaaagagagtccgcgcaagtcgctgtgttccggcttcaatgcggctgacccggatgccatcatcgcatggaatcgccgcatggcagaccttgtgatgatggatgaactggcaaaagcgatccgcggacaggtaccggcacagacgctt

SEQ ID NO: 30903 - DNA, 260 bp, Unknown
  Description of Unknown: RightRegion for integrase B4904 sequence
tcaagttcgactgagaagcgtctggtcagagtggcgagaatcgaactcacggcctcttgaaccccattgtgctccattcgcggacacattggtcaaaacggcacacaatatacgccatatcactaatttccgaatccgttttttcattctatttcatttgatgtcaagaagtttcgtttctattgtggtcaaattgtggtcaaacgaccccgacaaatgacctttcttccccagctaagttacatcgcgcaatttcgatt

SEQ ID NO: 30904 - DNA, 260 bp, Unknown
  Description of Unknown: RightRegion for integrase B4905 sequence
gaaagtgacctctccctcaccctccatcccgtggttttttcttcactcaccaaccgataacatcaatgcgtgggtgagcttgcgcacatggagatgatctccgccatcgtgtaccagctgacgcgcaatctcacacctgagcagattaaagaaggcggctttgacgcctactttgtcgatcacacgaccggcatttacccgcagtcggcctccggtgtgccgtggagcgccgcaacgttccagtccaaaggcgacccgat

SEQ ID NO: 30905 - DNA, 260 bp, Unknown
  Description of Unknown: RightRegion for integrase B4906 sequence
agcgacctccatctgacaatccaccccaaaattgctatacctcaaacctctaacatttaagttattgctgctgcgcgctgcatgaagtaccccattcaatctgctcgtgcttcggcggtgacgatctcgtgctcagcaacgatggctatcagctgttcgtaaccctcggtcagttctcgatcatccgacttgagcgcgacattcagctgctcatgcccgcttacgacgtatgtctgccgcggcgcgactgctcgaacagc

SEQ ID NO: 30906 - DNA, 109 bp, Unknown; identical to SEQ ID NO: 30870
  Description of Unknown: RightRegion for integrase B4907 sequence

SEQ ID NO: 30907 - DNA, 109 bp, Unknown; identical to SEQ ID NO: 30870
  Description of Unknown: RightRegion for integrase B4908 sequence

SEQ ID NO: 30908 - DNA, 260 bp, Unknown
  Description of Unknown: RightRegion for integrase B4909 sequence
gaaagtgacctctccctcaccctccatcccgtggttttttcttcactcaccaaccgataacatcaatgcgcgggtgagcttgcgcacatggagatgatctccgctatcgtgtaccagctgacgcgcaatctcacgcccgagcagatcaaggagggcggctttgacgcctactttgtcgatcacacgaccggcatttacccgcagtcggcctccggtgtgccgtggagcgccgcaacgttccagtccaaaggcgacccgat

SEQ ID NO: 30909 - DNA, 260 bp, Unknown
  Description of Unknown: RightRegion for integrase B4910 sequence
tccaccacaagtcaaaaaatccgaacattatcatcaatggtgatacgttcggatttttgatttttatgagttgttttataatttagaaattactgtggtttgtagcatattctcggcctcctccaagccttgcatcacttccgccatgatgcgagtggccaagataaatcctgaactgaacgcttcacactcagtgatgcaggacagttcacttgtgcagtccttgaatttttcaaaggtttctttttgtttcattgtca

SEQ ID NO: 30910 - DNA, 260 bp, Unknown
  Description of Unknown: RightRegion for integrase B4911 sequence
tcaagttcgactgagaagcgtctggtccgagtggcgagaatcgaactcacggcctcttgaaccccattgtgcttctctcgaaaacacaatgtacgatccgatactgcctagactcagtatcgttaaatttcaaatgtattatatcattctgtttcatttttcaacttgggtatactcctgttgtgtccgacatgaataaaatcgttcagaaaactgttgcatcgtctttccccacatggacgttagctgtatgagatatg

SEQ ID NO: 30911 - DNA, 260 bp, Unknown
  Description of Unknown: RightRegion for integrase B4912 sequence
agcgacctccatctgacaattcaccccaaaattgctatacctcaaacctctaacatttaagttattgctgctgcgcgctgcatgaagtaccccgttcaatctgctcgtgcttcggcggtgacgatctcgtgctcagcaacgatggctatcagctgttcgtaaccctcggtcagttctcgatcatccgacttgagcgcgacatccagctgctcatgcccgcttacgacgtatgtctgccgcggcgcgactgctcgaacagc

SEQ ID NO: 30912 - DNA, 260 bp, Unknown
  Description of Unknown: RightRegion for integrase B4913 sequence
tctgtgttcttcataaaacacacttttgggtttgtttacaggatagagaacgcacaataatcgtgcgttctttttctatgccacgggagggggtctaagtagtcaaagtagttgtttttaaggttttgcgtgtaacttcctctaagtacgcgcgtattaagcgaaagtttacgcaaaaaccgatttttaactacttagactacttaggcggggtaaacttagccctttttcagctcaaggacagcggactcaatcagctt

SEQ ID NO: 30913 - DNA, 98 bp, Unknown
  Description of Unknown: RightRegion for integrase B4914 sequence
gaaagttcgtctgggatgcgtctggtccgagtggcgagaatcgaactcacggcctcttgaaccccattcaagcgcgctaccaaaactgcgctacaccc

SEQ ID NO: 30914 - DNA, 260 bp, Unknown
  Description of Unknown: RightRegion for integrase B4915 sequence
tctgtgttcttcatcaaacacacctttggatttgtttataggatagagaacgctgattgaatcggcgttctttttctttgccacgggacgagatgaagtagttaaagtagttgtttttcggtttttgcgtaaactttcacctaatacgcgcgtacttagaggaagttacacgcaaaaacggattttccactactttaactacttgaacggggttaaatcagctctttttcagttcaaggacagcggactcaatcagcttg

SEQ ID NO: 30915 - DNA, 260 bp, Unknown
  Description of Unknown: RightRegion for integrase B4916 sequence
tccaccacaagtcaaaaaatccgaacattatcatcaatggtgatacgttcggatttttgatttttatgagttgttttataatttagaaattactgtggtttgtagcatattctcggcctcctccaagccttgcatcacttccgccatgatgcgagtggccaagataaatcctgaactgaacgcttcacactcagtgatgcaggacagttcacttgtgcagtccttgattttttcaaaggtttctttttgtttcattgtca

SEQ ID NO: 30916 - DNA, 240 bp, Unknown
  Description of Unknown: RightRegion for integrase B4917 sequence
ccaggtatgaagaatgcagatataccctatatcagctcccagatactttgcatcttttgacaattcattcaatgtggctgaagcagcatgatacagtgcatcatataacagcttctggttgctgtaaataatggaattcaattcctcaggaactgtgaatactacatgataatagggtgcatccaatacgttctctttttgtgcatcaatccatttctctttcggaaactcctggcacat

SEQ ID NO: 30917 - DNA, 109 bp, Unknown
  Description of Unknown: RightRegion for integrase B4918 sequence
gattatgtttcgtatgaacgaaacggtgaaaaattcaatattaaagtagaattctactaagtcaccgaaaatggtggctttttctttgttttttagtgaattgtcacgt

SEQ ID NO: 30918 - DNA, 260 bp, Unknown
  Description of Unknown: RightRegion for integrase B4919 sequence
agcgacctccatctgacaatccaccccagaattgctatacctcaaacctctaacatttaagttattgctgctgcgcgctgcatgaagtaccccgttcaatctgctcgtgcttcggcggtgacgatctcgtgctcagcaacgatggctatcagctgttcgtaaccctcggtcagttctcgattatccggctcgagcgcgacattcagctgctcatgcccgcttacgacgtatgtctgccgcggcgcgactgctcgaacagc

SEQ ID NO: 30919 - DNA, 260 bp, Unknown
  Description of Unknown: RightRegion for integrase B4920 sequence
gaaagttctactgagatgcgtctggtccgagtggcgagaatcgaactcacggcctcttgaaccccattgtgcttctctcgaaaacacaatgtacaatccgatactgcctagactcagtaccgttaaatttcaaatgtattatatcattctgtttcattggatgtcaagacgtttcattccttttgtggtcaaattgtggtcaaacgaacccgacaaatgacctttctcccccggctaagttacatcgcgcaatttcgatt

SEQ ID NO: 30920 - DNA, 260 bp, Unknown
  Description of Unknown: RightRegion for integrase B4921 sequence
tatttgcagattaaccgcaattggtttgcggttataggcaacctgcaaaataccagataggcggcttgcgtatttgccttgtaacgcacgaaaacggggcaccccttatcagggtgccccgcttgaacgtgtgttttagcgcctagcacttggcaaggtacttttccgacccattggacgtgccgacggcaacataacgcgtcgcgccgctgtatgcggtatagtgcgcccacgtgtagccgtccttttccacaacgtca

SEQ ID NO: 30921 - DNA, 76 bp, Unknown
  Description of Unknown: RightRegion for integrase B4922 sequence
gaaagttcgtctgggatgcgtctggtccgagtggcgagaatcgaactcacggcctcttgaaccccattgtgcttct

SEQ ID NO: 30922 - DNA, 75 bp, Unknown; identical to SEQ ID NO: 30880
  Description of Unknown: RightRegion for integrase B4923 sequence

SEQ ID NO: 30923 - DNA, 260 bp, Unknown
  Description of Unknown: RightRegion for integrase B4924 sequence
agcgacctccatctgacaatccaccccaaaattgctatacctcaaacctctaacatttaagttattgctgctgcgcgctgcatgaagtaccccgttcaatctgctcgtgcttcggcggtgacgatctcgtgctcagcaacgatggctatcagctgttcgtaaccctcggtcagttctcgatcatccgacttgagcgcgacatccagctgctcatgcccgcttacgacgtatgtctgccgcggcgcgactgctcgaacagc

SEQ ID NO: 30924 - DNA, 260 bp, Unknown; identical to SEQ ID NO: 30893
  Description of Unknown: RightRegion for integrase B4925 sequence

SEQ ID NO: 30925 - DNA, 260 bp, Unknown
  Description of Unknown: RightRegion for integrase B4926 sequence
cctggaatggggaaatacaaggctgaaagcgttggtgctggccaccagggaaatccgtgaggcgatggactggaccctgatcagcttgtccggattgaccacgctggaccagggcgtccagtttaaatttcctccattcccatctgtatacgccacatacgggtaattcttgagcttcgcaaaatcaaagggcgtttcccttaaaagcggatggtttctggaaagctgcacggaaaaagatacctccgccacatccctgt

SEQ ID NO: 30926 - DNA, 260 bp, Unknown
  Description of Unknown: RightRegion for integrase B4927 sequence
gttacccatgtgctgcatggtgcggcccacgcaggtcttcatggacctttgccggggtgagacggccatgcccaccgctgcgccgagcaccatgccggcgccgataccgcaccagaacgcggtattttccatttcactcacactccttttcgcacagcgacagtatgccccgtgcgcggcaaaaaagtcggaaagtgcattgctaaaatccgccattgccgttataatattcttaaaatcagacaaaaagcgaggaagtc

SEQ ID NO: 30927 - DNA, 260 bp, Unknown
  Description of Unknown: RightRegion for integrase B4928 sequence
atccgctccatcgtaaagtcctgtgttttcgatggcgatcatctcgacgttactttttaacgtctttctacttttcgttctgattggggttccgacctgccccatcatatcatgtcccagatgctgtctctgatatccatagcttcttgacaccccgaaatcatcataatcactgtactcaaacccttttgcgatcggtgaaaatgctttcagaccatacttttttacatatgacccatcctccttttcctggatctcat

SEQ ID NO: 30928 - DNA, 123 bp, Unknown
  Description of Unknown: RightRegion for integrase B4929 sequence
agcgacctccatctgacaatccaccccaaaattgctatacctcaaacctctaacatttaagttattgctggcaaggttattacgaagtttgcctgcacgctgttcctgccaacgccgctgcag

SEQ ID NO: 30929 - DNA, 260 bp, Unknown
  Description of Unknown: RightRegion for integrase B4930 sequence
tcaagttcgactgagaagcgtctggtccgagtggcgagaatcgaactcacggcctcttgaaccccattgtgcttctctcaaaaacgcaatggacactccgataccacttgtacgcagtatcatcaaatttcaaaattattttatcattctgtttcgttagatgtcaagatgtttcgtttcttttgtggtcaaattgtggtcaaccgaccctgacaaatgaccattctcccctactaagttacatggcgcaattccgattt

SEQ ID NO: 30930 - DNA, 109 bp, Unknown
  Description of Unknown: RightRegion for integrase B4931 sequence
agtagatggaatttggacaatacggataaattttctttagatattaagttgcgtgtataacttacaacataaatgttctaaagaaatggctcatgtagaaatactagga

SEQ ID NO: 30931 - DNA, 76 bp, Unknown
  Description of Unknown: RightRegion for integrase B4932 sequence
ggctgttcgactgagaagcaaatggtccgagtggcgagaatcgaactcacggcctcttgaaccccattcaagcgcg

SEQ ID NO: 30932 - DNA, 260 bp, Unknown
  Description of Unknown: RightRegion for integrase B4933 sequence
gaaagttctactgagatgcgtctggtccgagtggcgagaatcgaactcacggcctcttgaaccccattgtgcttctctcaaaaacgcaatggacactccgataccacttgtacgcagtatcatcaaatttcaaaattattttatcattctgtttcgttagatgtcaagatgttttgtttcttttgtggtcaaattgtggtcaaccgaccctgacaaatgaccattctcccctactaagttacatggcgcaattccgattt

SEQ ID NO: 30933 - DNA, 260 bp, Unknown
  Description of Unknown: RightRegion for integrase B4934 sequence
gatcagcatgagctggagtttcacttgattggcggattgaagttcaaagaaaatatataacagaaaatgccttgcagtaaaattgcagggcatttctttgttagttttggcactggatttccgcagaattttgtggtatccttgttggttgaaaggagtgatatcaatggcaagaaacagagtaatcttgttcggctactgcatgaaaaacggcgaaataacgaccgaaccaaaagaagtttacgcagttgaagaaattt

SEQ ID NO: 30934 - DNA, 260 bp, Unknown
  Description of Unknown: RightRegion for integrase B4935 sequence
tcattctttttcgtgaagcactgtgtcggatttgttttcatagtagaggacgtaggttaaactgcgtcctcttttttaggtgtctcgtaagtaagagcctgtttggaatctccaatgccagcagtggttgggtcagtcacgataccgagaatcgtgaggactgcgaacagggcatttacgactgccaacagcttgtttcccagctcacccaaattgagggtgtaaccgaagacagcggcaatcacctgtaccagcagaag

SEQ ID NO: 30935 - DNA, 260 bp, Unknown
  Description of Unknown: RightRegion for integrase B4936 sequence
atcggtgagaacatccgggaagttcttaaagactctcttacgggtcaccatatcatctgaacactttggatcaattggcgaaaagcccagttgtttcaaggtgttcaggcttttttacggtcggaaattttctaaaaactccatggatcaatggccgctttgcagaggttcaaacgggatttgaacctctgtttttccatattcaagcggattttcagtggcagcgccctttttcagagggctgcagcggctggatttca

SEQ ID NO: 30936 - DNA, 260 bp, Unknown
  Description of Unknown: RightRegion for integrase B4937 sequence
gatactcccccgttcgtgcacgacaacaaggtacacctagagatttttcttcgccaataacacctatgagaagggtaagcatccatgcaatcgttgatgacaggtgttagccgagaacgtgggccaccggaaagtcagcacaacagaaaaggggcctccgtatatctgggccgatgttgggagaccccaccccgaaacgaggcgaaaggattataccatggacgaggaaaacgagtacacgctaacccgctactacacca

SEQ ID NO: 30937 - DNA, 260 bp, Unknown; identical to SEQ ID NO: 30873
  Description of Unknown: RightRegion for integrase B4938 sequence

SEQ ID NO: 30938 - DNA, 76 bp, Unknown
  Description of Unknown: RightRegion for integrase B4939 sequence
tcaagttcgactgagaagcgtctggtccgagtggcgagaatcgaactcacggcctcttgaaccccattgtgcttct

SEQ ID NO: 30939 - DNA, 260 bp, Unknown
  Description of Unknown: RightRegion for integrase B4940 sequence
agcgacctccatctgacaatccaccccaaaattgctatacctcaaacctctaacatttaagttattgctgtcaaaacataaaatgttataggtgtacgaaacgacaaaaaaagcgccgtcaatcgacggcgctttcgcatttccttatcagaatcccaatcctttcaaaccactaagtcccttaagctgcttcaaaccgccggaactgcttccgccactcgacctactcgacccgccggaactctttttgctcttgcttg

SEQ ID NO: 30940 - DNA, 260 bp, Unknown
  Description of Unknown: RightRegion for integrase B4941 sequence
tatctgcaaataaaccgcaactggtttgccgttataggtaacctacaaaataccagataggcggcttgcgtatttgccctgtaacgcacgaaaacggggcaccccttatcagggtgccccgtttgaacgttagattttgagccgttgacccggataaatgatattcgggttcgtgatgccgtttttggcagcaatcttctgataggtcgtgccgaacttggccgcaatgcctgaaagcgtgtcaccagatttaacggtgt

SEQ ID NO: 30941 - DNA, 76 bp, Unknown; identical to SEQ ID NO: 30921
  Description of Unknown: RightRegion for integrase B4942 sequence

SEQ ID NO: 30942 - DNA, 70 bp, Unknown
  Description of Unknown: RightRegion for integrase B4943 sequence
agcgacctccatctgacaatccaccccaaaattgctatacctcaaacctctaacatttaagttatcgctg

SEQ ID NO: 30943 - DNA, 260 bp, Unknown
  Description of Unknown: RightRegion for integrase B4944 sequence
agcgacctccatctgacaatccaccccaaaattgctatacctcaaacctctaacatttaagttattgctgctgtgctctgcacgaagtaccccgttcaatctgctcgtgcttcggcggtgacgatctcgtgctcagcaacgatggctatcagctgttcgtaaccctcggtcagttctcgattatccggctcgagcgcgacatccagctgctcatgcccgcttacgatgtatgtctgccgcgacgcgactgctcgaacagc

SEQ ID NO: 30944 - DNA, 109 bp, Unknown
  Description of Unknown: RightRegion for integrase B4945 sequence
atccgctccatcgtaaagtcctgtgttttcgatggcgatcatctcgacgttactttttaacatctttctacttttcgttctgattggggttccgacctgccccatcata

SEQ ID NO: 30945 - DNA, 109 bp, Unknown; identical to SEQ ID NO: 30870
  Description of Unknown: RightRegion for integrase B4946 sequence

SEQ ID NO: 30946 - DNA, 109 bp, Unknown; identical to SEQ ID NO: 30870
  Description of Unknown: RightRegion for integrase B4947 sequence

SEQ ID NO: 30947 - DNA, 260 bp, Unknown
  Description of Unknown: RightRegion for integrase B4948 sequence
tataatgaatcattacggcaaccgaatgttttcttttacgcgaaaataaacaggcaataaaaatgtgtgataaaaggagaaatagaccatgagttgtgtgatttacgcaaaacaaaatgatgatataagtgtgtacgaacaatataatcaatgtgccacacttgccaaacgatacggctattcaatagaaagcagggtgcttgactttgacggtactaactttcataaagccgtaaacagagtgattgcggaatgcgacg

SEQ ID NO: 30948 - DNA, 260 bp, Unknown
  Description of Unknown: RightRegion for integrase B4949 sequence
agcgacctccatctgacaatccaccccaaaattgctatacctcaaacctctaacatttaagttattgctgctgcgcgctgcatgaagtaccccgttcaatctgctcgtgcttcggcggtgacgacctcgtgctcagcaacgatggctatcagctgttcgtaaccctcggtcagttctcgatcatccgacttgagcgcgacattcagctgctcatgcccgcttacgacgtatgtctgccgcggcgtgactgctcgaacagc

SEQ ID NO: 30949 - DNA, 260 bp, Unknown; identical to SEQ ID NO: 30905
  Description of Unknown: RightRegion for integrase B4950 sequence

SEQ ID NO: 30950 - DNA, 76 bp, Unknown
  Description of Unknown: RightRegion for integrase B4951 sequence
ggctgttcgactgagaagcaaatggtccgagtggcgagaatcgaactcacggcctcttgaaccccattgtgcttct

SEQ ID NO: 30951 - DNA, 260 bp, Unknown
  Description of Unknown: RightRegion for integrase B4952 sequence
agatgggctccgaaaaacaactttacccttgacctgttcccgctctaccaaaaagaatagacagaacttgcgcaaaaagaaaagaggatggaactttccgtcctcttttcttcattgacatctttgtggttcgtacaaattagcgccataaagatataccttatttttttgccatttccagcagcgccttgaccttggctacgcgctcgatgtagttgtcgtgctcccagtcccaaacggcctgcatactcaccggggcg

SEQ ID NO: 30952 - DNA, 260 bp, Unknown
  Description of Unknown: RightRegion for integrase B4953 sequence
tatttgcagattaaccgcaattggtttgcggtcataggcaacctgcaaaataccagatagacggcttgcgtatttaccctgtaacgcacgaaaacggggcaccccttatcagggtgccccgtttgaacgtcagattttgagccgttgacccggatagatgatattcgggttcgtgatgccgtttttggcggcaatcttctgataggtcgtgccgaacttagccgcaatgcctgaaagcgtgtcaccagatttgacggtgt

SEQ ID NO: 30953 - DNA, 260 bp, Unknown
  Description of Unknown: RightRegion for integrase B4954 sequence
gatcaacatgagttggagtttcatttgatcggcggattaaaattcaaagaaaatgtataaagcacattgacaatttagcataattatgataaaatatattcaggaggcgatgattatggatatgaatatgataagacccgtttcggatctaagaaacaattttgcggatatttcaaaaaccgtgcatgaaactgaacaacccgtcttcctcactaaaaacggatatggcgatatggtcgttatgagtatggaggcttttg

SEQ ID NO: 30954 - DNA, 260 bp, Unknown
  Description of Unknown: RightRegion for integrase B4955 sequence
tcaagtattatatggacaaaacaaggtgacaatattgatattaaagtaaattttctataggctcgtaacagccgaagattctgtgtttcgagtggagcaagttttaaacttgccattggtgccacgtgtagaactttctccatctgaagacacttgttacgagcataaaaaataagggactatcaaaagatagtcccttaaatatttggaagtataaaatgtggtgattgagatatggtatttatattattgccgttatc

SEQ ID NO: 30955 - DNA, 260 bp, Unknown
  Description of Unknown: RightRegion for integrase B4956 sequence
ggctgttcgactgagaagcaaatggtccgagtggcgagaatcgaactcacggcctcttgaaccccattgtgcttctctcgaaaacacaatgtacaatccgatactgcctagactcagtatcgttaaatttcaaatgcattataccattctgtttcattggatgtcaagacgtttcattccttttgtggtcaaattgtggtcaaacgaccccgacaaatgacctttctcccccagctaagttacatcgcgcaatttcgatt

SEQ ID NO: 30956 - DNA, 109 bp, Unknown; identical to SEQ ID NO: 30870
  Description of Unknown: RightRegion for integrase B4957 sequence

SEQ ID NO: 30957 - DNA, 75 bp, Unknown
  Description of Unknown: RightRegion for integrase B4958 sequence
ggctgttcgactgagaagcaaatggtccgagtggcgagaatcgaactcacggcctcttgaaccccattcaagcgc

SEQ ID NO: 30958 - DNA, 260 bp, Unknown
  Description of Unknown: RightRegion for integrase B4959 sequence
agcatacaaaccgtttcgataatatgcggttgtatggcagttacaaagcgtcgggaataacttctcgacgcttttcttttgccacgaacaaaaaatctcccgccctcaaacgagagcgggagaaaattttatcagaacctgttcagtcccttgcgaccgataaccgcagggaaatcacgatagcagcagtccatgtcaacattacccttgatgccataaaccttgcccttccagctgtactgccagatgccaacatcgtc

SEQ ID NO: 30959 - DNA, 260 bp, Unknown; identical to SEQ ID NO: 30884
  Description of Unknown: RightRegion for integrase B4960 sequence

SEQ ID NO: 30960 - DNA, 76 bp, Unknown
  Description of Unknown: RightRegion for integrase B4961 sequence
gaaagttcgtctgggatgcgtctggtccgagtggcgagaatcgaactcacggcctcttgaaccccattcaagcgcg

SEQ ID NO: 30961 - DNA, 260 bp, Unknown
  Description of Unknown: RightRegion for integrase B4962 sequence
agcgacctccatctgacaatccaccccaaaattgctatacctcaaacctctaacatttaagttattgctgctgcgcgctgcatgaagtaccccgttcaatctgctcgtgcttcggcggtgacgatctcgtgctcagcaacgatggctatcagctgttcgtaaccctcggtcagttctcgatcatccggctcgagcgcgacattcagctgctcatgcccgcttacgatgtatgtctgccgcggcgcgactgctcgaacagc

SEQ ID NO: 30962 - DNA, 260 bp, Unknown
  Description of Unknown: RightRegion for integrase B4963 sequence
atcggtgagaacatccgggaagttcttaaagactctcttacgggtcaccaagtaagctgaacactatggatcaattggcgaaaaagccagttgttccatagtgttttcagcttttcgaggccgaaaattttctgaaaactccatggctcaataaacgcattccagaggttcaaacaggatttgaacctctgtttttccatatccaaggggaattttatgagcagcgccctttttcggcggctggtcaagagctgaaatca

SEQ ID NO: 30963 - DNA, 73 bp, Unknown
  Description of Unknown: RightRegion for integrase B4964 sequence
tcaagttcgactgagaagcgtctggtccgagtggcgagaatcgaactcacggcctcttgaaccccattgtgct

SEQ ID NO: 30964 - DNA, 77 bp, Unknown
  Description of Unknown: RightRegion for integrase B4965 sequence
ggctgttcgactgagaagcaaatggtccgagtggcgagaatcgaactcacggcctcttgaaccccattgtgcttctc

SEQ ID NO: 30965 - DNA, 260 bp, Unknown
  Description of Unknown: RightRegion for integrase B4966 sequence
ctttcggatgtgtcaaaaagttcgcctatactctccaacggtcaaccaaaaaccacctgatgaagatcaggtggtttttttgttctcataagaaaaaccacaagctatgcttgtggaagaatagagccgtagcgttgaaacggtagaaaaagaacctccttttgctataattagaagcgggtaacgccaaccgcatactaaagcaaaaggaggttcatccatatggacgagaaaagtttatcacatacgagctggaattg

SEQ ID NO: 30966 - DNA, 260 bp, Unknown; identical to SEQ ID NO: 30929
  Description of Unknown: RightRegion for integrase B4967 sequence

SEQ ID NO: 30967 - DNA, 260 bp, Unknown
  Description of Unknown: RightRegion for integrase B4968 sequence
agcgacctccatctgacaatccaccccaaaattgctatacctcaaacctctaacatttaagttattgctgctgcgctctgcacgaagtaccccgttcaatctactcgtgcttcggcggtgacgatctcgtgctcagcaacgatggctatcagctgttcgtaacccttggtcagttctcgattatccggcttgagcgcgacatccagctgctcatgcccgcttacgacgtatgtctgccgcggcgcgactgctcgaacagc

SEQ ID NO: 30968 - DNA, 260 bp, Unknown
  Description of Unknown: RightRegion for integrase B4969 sequence
gccgctgaggcgggtgaggtgttcggatgctacgcctcatgctccaccaatgcaagataatccgaaccttagaccaatcggtcatgggttcggatttcttgtttttatcaaggacattgaagtttagtttcgggatagaataacatcaaattcaggaggatatacccatggagaagctcgtaaactgtgcgttcaatatagataccgcctgcgtggaacttcacttcacggatgggagcatttgctccatcgactgcacc

SEQ ID NO: 30969 - DNA, 260 bp, Unknown; identical to SEQ ID NO: 30923
  Description of Unknown: RightRegion for integrase B4970 sequence

SEQ ID NO: 30970 - DNA, 260 bp, Unknown
  Description of Unknown: RightRegion for integrase B4971 sequence
tcaagtattatatggacaaaacaaggtgacaatattgatattaaagtaaattttctataggctcgtaacagccgaagattctgtgtttcgagtggagcaagttttaaacttgccattggtgccacgtgtagaactttccccatctgaagacacttgttacgagcataaaaaataagggactatcaaaagatagtcccttaaatatttggaagtacaaaatgtggtgattgagatatggtatttatattattgccgttatc

SEQ ID NO: 30971 - DNA, 109 bp, Unknown
  Description of Unknown: RightRegion for integrase B4972 sequence
atccgctccatcgtaaagtcctgtgttttcgatggcgatcatctcgacgttactttttaacgtctttctacttttcgttctgattggagttccgacctgccccatcata

SEQ ID NO: 30972 - DNA, 260 bp, Unknown
  Description of Unknown: RightRegion for integrase B4973 sequence
gaacgagacctctccctcaccctccatcccgtggttttttcttcatccactaaccgataacatcaatgcgcgggtgagcttgcgcacatggagatgatctccgccatcgtgtaccagctgacgcgcaatctcacgcccgagcagatcaaggagggcggctttgacgcctactttgtcgatcacacgaccggcatttacccgcagtcagcctccggtgtgccgtggagcgccgcaacgttccagtccaaaggcgacccgat

SEQ ID NO: 30973 - DNA, 260 bp, Unknown
  Description of Unknown: RightRegion for integrase B4974 sequence
agcgacctccatctgacaatccaccccaaaattgctatacctcaaacctctaacatttaagttattgctgctgcgcgctgcatgaagtaccccgttcaatctgctcgtgcttcggcggtgacgatctcgtgctcagcaacgatggctatcagctgttcgtaaccctcggtcagttctcgattatccggctcgagcgcgacattcagctgctcatgcccgcttacgacgtatgtctgccgcggcgcgactgctcgaacagc

SEQ ID NO: 30974 - DNA, 260 bp, Unknown; identical to SEQ ID NO: 30572
  Description of Unknown: RightRegion for integrase B4975 sequence

SEQ ID NO: 30975 - DNA, 260 bp, Unknown
  Description of Unknown: RightRegion for integrase B4976 sequence
agcgacctccatctgacaatccaccccaaaattgctatacctcaaacctctaacatttaagttattgctgtcaaagcataaaatgttataggtttacgaaacgacaaaaaagcgccgtcaatcgacggcgctttcgcatttccttatcagaatcccaatcctttcaaaccactaagtcccttaagctgcttcaaaccgccggaactgcttccgccactcgacctactcgacccgccggaactctttttgctcttgcttgc

SEQ ID NO: 30976 - DNA, 260 bp, Unknown
  Description of Unknown: RightRegion for integrase B4977 sequence
tcaagtattatatggacaaaacaaggtgacaatattgatattaaagtaaattttctataggctcgtaacagccgaagattctgtgtttcgagtggagcaagttttaaacttgccattggtgccacgtgtagaactttctccatctgaagacacttgttacgagcataaaaaataagggactatcaaaagatagtcccttaaatatttggaagtacaaaatgtggtgattgagatatggtatttatattattgccgttatc

SEQ ID NO: 30977 - DNA, 77 bp, Unknown
  Description of Unknown: RightRegion for integrase B4978 sequence
tcaagttcgactgagaagcgtctggtccgagtggcgagaatcgaactcacggcctcttgaaccccattcaagcgcgc

SEQ ID NO: 30978 - DNA, 260 bp, Unknown; identical to SEQ ID NO: 30909
  Description of Unknown: RightRegion for integrase B4979 sequence

SEQ ID NO: 30979 - DNA, 260 bp, Unknown
  Description of Unknown: RightRegion for integrase B4980 sequence
tttgactggagcgaggaaggagtgctaataactccgggtactacctctggcgtaccatgacgagtgttcttataggatttgatcctttgagaacactcgtcatttttattgcccattttgcgccggttcgtaactgacatagacacctctgcgggtgttgacggttacatcgggcacgggcatggacggggtatccgggataaacagggcaccgacacagttgtagtagatggtcaatttctggacccattcgccgttga

SEQ ID NO: 30980 - DNA, 260 bp, Unknown
  Description of Unknown: RightRegion for integrase B4981 sequence
aaggcagaccgcggcgaagggttcgtatgctgcgcgtcttgccctgttcttagaccttgaagcaagatagttgtttcaaggttttttttgtttaaaaatgaaaatagatgtattataatgggcataaagtatttattttaaatgatattaattttgtatttcaaaatggattacaaatgtaaggaggattttgaaatgaaggaaaagcttaagattaatgtgacgaagccacaatatgtgcaggtatctgatattacata

SEQ ID NO: 30981 - DNA, 260 bp, Unknown
  Description of Unknown: RightRegion for integrase B4982 sequence
aagcaggacgaaatgaccgtcactttccttggcggcctgaaattcactgagctgatataggagcaagccatgaagaagacacgctttataccatacggatacaccatgcgaaacggacgaaccgtcattgagcacggcgaagctgacattatccgatatatcttcgacgagtacatcaaaggagcctctctcaaagatctggccgaagaactgacagctcgcaaagtgccttatacggagaagacggaagtatgggataa

SEQ ID NO: 30982 - DNA, 260 bp, Unknown
  Description of Unknown: RightRegion for integrase B4983 sequence
gcgcccggctcttctggtggttcggatttaaaacgccccgctctgcatctatgctgttgatataaacgcctgctgctttcaatacctcttttgtcttatcaagctgcgcctcaaaatcgcccttattgaaaagcgtaactctatacatttccctgcgctctttctcttcgtcgtctgcatttaccgcaggcgtacccagcagccgcaaaaatgtatagtatgcgtccggcttatcccgtccagtgtatacgcccctctgg

SEQ ID NO: 30983 - DNA, 260 bp, Unknown
  Description of Unknown: RightRegion for integrase B4984 sequence
gcgcccggctcttctggtggttcggatttaaaacgccccgctctgcgtctatgctgttgatataaacgcctgctgctttcaatacctcttttgtcttatcaagctgcgcctcaaaatcgcccttatggaaaagcgtaactctatacatttccctgcgctctttctcttcgtcgtctgcatttaccgcaggcgtacccagcagccgcagaaacgtataatatgcgtctggcttatcccgcccagtgtaaacgcctctctgg

SEQ ID NO: 30984 - DNA, 75 bp, Unknown; identical to SEQ ID NO: 30957
  Description of Unknown: RightRegion for integrase B4985 sequence

SEQ ID NO: 30985 - DNA, 260 bp, Unknown
  Description of Unknown: RightRegion for integrase B4986 sequence
aacaccctattctttatagggacactgttcggacaaacaacaaaacaccgagtagagtaataagctctgcccggtgttttgttgttggtgggtagaacgggtagagaaaaatcgcaatttcccataaactctcttatagtagctttcttatagactactttatgaaaaacatagatttactctacccactctacccgtaaggaggaatatatactcaacagcctgtcggctgaatgagccgtttaggactttttcagttc

SEQ ID NO: 30986 - DNA, 260 bp, Unknown
  Description of Unknown: RightRegion for integrase B4987 sequence
agcagaacggaaataggattcgacatgaaattcggacccgtcttccgggaaaggatttgattatgaaacacacaccatacggatacgacattgtgggcggtgcggcagtcatcaacgaagaacaggctgccaacttgcgaaagctgtgtgagaactacctttccggcatgtcttttgtacaggcggcaaaggatgccgggttggagatgaagcacagcggtgttaagagactgatgcagaacccacgctaccttggagac

SEQ ID NO: 30987 - DNA, 260 bp, Unknown
  Description of Unknown: RightRegion for integrase B4988 sequence
gttgattttggtaggaacaagggtggagaagtccacctggacgtctacctgaaagaatagaaaaaggcccccggcaactgccaggggccttgcttataggtcaatgtccaactcaaccgggcaatggtcgctgcccataatgtcactatgtattttcgcgtctacgatcttatccttggcgcagtcatcgaccaggaaatagtcaatccgccaccccgcatttttctccctggcatggaaacggtagctccaccaggaat

SEQ ID NO: 30988 - DNA, 75 bp, Unknown; identical to SEQ ID NO: 30957
  Description of Unknown: RightRegion for integrase B4989 sequence

SEQ ID NO: 30989 - DNA, 260 bp, Unknown; identical to SEQ ID NO: 30986
  Description of Unknown: RightRegion for integrase B4990 sequence

SEQ ID NO: 30990 - DNA, 260 bp, Unknown
  Description of Unknown: RightRegion for integrase B4991 sequence
acggtgagcggcagaggggagggctataaggcggctttcggagaaattttcagacggtagggatcatttcggggaggagggtggtacggaagaattagtaccaccatgatgtcaatgactaactaatatgtggcagaaatttcgcatatttttatgatttcggcagtttcggatatatagttatctcaaaatcatcgggtgaaccgctccagcgggtgttctgcgtttttttgtaaacgactttttcaagcacttcttta

SEQ ID NO: 30991 - DNA, 260 bp, Unknown; identical to SEQ ID NO: 30842
  Description of Unknown: RightRegion for integrase B4992 sequence

SEQ ID NO: 30992 - DNA, 260 bp, Unknown
  Description of Unknown: RightRegion for integrase B4993 sequence
gttgatttcggtaggaacaagggtggagaagtccacctggacgtctacctgaaagaatagaaaaaggcccccggcaactgccaggggccttgcttataggtcaatgtccaactcaaccgggcaatggtcgctgcccataatgtcactatgtattttcgcgtctacgatcttatccttggcgcagtcatcgaccaggaaatagtctatccgccaccccgcatttttctccctggcatggaaacggtagctccaccaggaat

SEQ ID NO: 30993 - DNA, 260 bp, Unknown
  Description of Unknown: RightRegion for integrase B4994 sequence
gatcagtatgagctggagtttcacttgatcggcggattgaaattcaaagaaaacatataacagaaaatgccttgcagtaaaattgcagagcttttctttgttggttttggtactggatttccgcagaattttgtagtattgttgtacatggaggtgaaattagatgcccaaaaacagagtaataccgttcggctactgcatgaaaaacggcgaaataacgaccgaaccaaaagaagtttatgcagttgcagagattttca

SEQ ID NO: 30994 - DNA, 260 bp, Unknown
  Description of Unknown: RightRegion for integrase B4995 sequence
aaacgcagtcaacaagtacatatttattatttagggattggcaaaattgaccttgagtaaaatttgtacccaaacagtaacgcccttatgctcgttatttcaaacagcgctttgctccctctatccgccaccggcggcggtcgcaaggctaccaatcgaaccgattgtaaaatcggttcgacttaacacaaactatttgttaattaacatatctatatagcatagcaaaaactgtgtatatgttcgttttggttttgcaa

SEQ ID NO: 30995 - DNA, 260 bp, Unknown
  Description of Unknown: RightRegion for integrase B4996 sequence
aaagaggatgaaatgtccgtagaattccttggcggacttcgattcaaggaacgcatataggaggcagtcatgaaaaagacgcggtatatcccatatggatacacaatgcgcaatggcagaaccgtcatctcaggagaagaagcggaagttatcagagagattttcaattcgtatctgaacggagcttccttgaaggcaattgcggacgagttgaccgaccgccaaatcccctatacgcaaaagactgccatatgggacaa

SEQ ID NO: 30996 - DNA, 260 bp, Unknown
  Description of Unknown: RightRegion for integrase B4997 sequence
ataaaaaaagctgtaaagaagtgcatctgcagcaatgatgggcttcacattattttttaatgtcgttctatattttattcgtatcggtgtgcctgtctgccccatcatgtcgtgccccaggtgttctctcttataaccatagctcctggccacaccgaaatcatcatagtcattatagggaaaacttttcgcaatcggactgaatcctttcagtccatacttctttgtccagtttaccatccccgggctctcctggtcat

SEQ ID NO: 30997 - DNA, 109 bp, Unknown
  Description of Unknown: RightRegion for integrase B4998 sequence
gctgattttggtaggaacaagggcggagaagttcacctggacgtctacctgaaagaatagcgaaaagcccccggcaactgccaggggctttacttataggtcaatatcc

SEQ ID NO: 30998 - DNA, 109 bp, Unknown
  Description of Unknown: RightRegion for integrase B4999 sequence
ttttccgtggcgttgccttcccctcatctccaccaaatgctatgcagtcgaactttttaataactgcttatcttatacataaaaggctgattacagaagaaactgtaac

SEQ ID NO: 30999 - DNA, 260 bp, Unknown
  Description of Unknown: RightRegion for integrase B5000 sequence
aaagaggatgaaatgtccgtagaattccttggcggacttcgattcagggaacgcatataggaggcagtcatgaaaaagacgcggtatatcccatacggatacacaatgcgcaatggtagaacggtcatctccggagaagaagcagaagttatcagagagattttcaaatcgtatctgaacggagcttccttgaaagcgattgctgacgagttgagcgaccaccagattccttatacgcaaaagagcgctatatgggataa

SEQ ID NO: 31000 - DNA, 100 bp, Unknown
  Description of Unknown: RightRegion for integrase B5001 sequence
atcaaaatgatgacgggaaatcccgggtgttcgcgttgcgaacgtttggtgacccggtagggattcgaaccctagacctactgattcgtagtcagtcact

SEQ ID NO: 31001 - DNA, 260 bp, Unknown
  Description of Unknown: RightRegion for integrase B5002 sequence
aacgctgaccgctgcaatttcacgcttaacgtgacgccgctctttccggaaacagattaaaggcagtcagaaggctgtcttttttactgtcgaaatctggttcttgatttcctgatgaaaaaccttgactattcgttacgaatatgataaaatgattgagaggtgattctgtatggaaaccagaacagcaaggctcagcgtggggcattccgggggaactgccggagccgggagccgtaattataaagtcactctgccga

SEQ ID NO: 31002 - DNA, 260 bp, Unknown
  Description of Unknown: RightRegion for integrase B5003 sequence
gaacgcagtcaacaagtacatatttattacaaagagattggcaaaatcaaccttgagtaaattttgtacccaaacagtaacgccctattgtgcggtcaatcatcttgttaaggtcaacacccttgcgtacaagatagtctgacacaaagtcactcaacgttcgccattcggttgggttggttttcttaatcatatgtccggcttcatgtaaagctgtggcaaggattttctgacttgaaatttctgagcttaaaataatg

SEQ ID NO: 31003 - DNA, 260 bp, Unknown
  Description of Unknown: RightRegion for integrase B5004 sequence
aacgctgaccgctgcaatttcacgcttaacgtgacgccgctctttccggaaacagattaaaggcagtcggaaggctgtcttttttactgtcgaaatctggttcttgattccctgatgaaaaaccttgactattcgttacgaatatgataaaatgattgagaggtgattctgtatggaaaccagaacagcaaggctcagcgtggggcattccgggggaactgccggagccgggagccgtaattataaagtcactctgccga

SEQ ID NO: 31004 - DNA, 260 bp, Unknown
  Description of Unknown: RightRegion for integrase B5005 sequence
ggctgttcgactgagaagcaaatggtccgagtggcgagaatcgaactcacggcctcttgaaccccattgtgctccactcgtggacatgttggtcaaaacggcacacaatatacgctatatcactaatttcagaatccgttttttcattctatttcgtttgatgtcaagacgtttcattccttttgtggtcaaattgtggtcaaacgaccccgacaaatgacttttctcccccggctaagttacatcgcgcaatttcgatt

SEQ ID NO: 31005 - DNA, 260 bp, Unknown
  Description of Unknown: RightRegion for integrase B5006 sequence
aaggcagaccgcggcgaagggttcgtatgctgcgcgtcttgccctgttattaaaccttgaagcaagatagttgtttcaaggtttttttatgtttaaaaatgaaaatagatgtattataatgggcataaagtattaattttaaatgatattaattttgtatttcaaaatggattacaaatgtaaggaggatttttaaatgaaggaacagcttaagattaatgtgacgaagccacaatatgtgcaggtatctgatattacat

SEQ ID NO: 31006 - DNA, 260 bp, Unknown
  Description of Unknown: RightRegion for integrase B5007 sequence
gaacccatcagcctgcccggcgggttcggcctcatcatcccgctacgccgcgccgcctaagcctccaggcagcgccgagacgattctaccacggctagatgacgagcttctgacccgcgtagatgaggttcgggttgctgatgccgttcttggccgcgatggcctgataggttgtgccgaacttggcggcgatgccggaaagcgtgtcaccgctcttcacggtgtaggtggtctgcttgcccttgccgttgatgatgtcc

SEQ ID NO: 31007 - DNA, 260 bp, Unknown
  Description of Unknown: RightRegion for integrase B5008 sequence
gagtataacgcttcattacggcagccgaagttgtcgtattactccaaaatgaacaggtaataaaaatatgtatgcagaggagatacagactatgaattgcgtgatttacgcaagacagaacgacggcacaagcgtgtacgaacaatacaatcaatgtgcgacacttgcaaagcggtatggctattcaatagccgggaaagtgcttgattttgacggtactaaactccatgaagctataaacaaggtcattgcagaacacg

SEQ ID NO: 31008 - DNA, 109 bp, Unknown
  Description of Unknown: RightRegion for integrase B5009 sequence
aaatttgaaaaaagaacagctataatattaaatttagctgttcttttcttttttatataaaattacaaaatatccaatatctaaatatgtgacatctgctggtaccata

SEQ ID NO: 31009 - DNA, 260 bp, Unknown
  Description of Unknown: RightRegion for integrase B5010 sequence
aacaccctattctttatagggacactgttcggacaaacaacaaaacaccgagtagagtaataagctctgcccggtgttttgttgttggtgggtagagcgggtagagaaaaatcgcaatttcccataaactctcttatagtaactctcttatagactactttatgaaaaatacagatttactctacccactctacccgtaaggaggaatatatactcaacagcctgtcggctgagtgagccgtttaggactttttcagttc

SEQ ID NO: 31010 - DNA, 260 bp, Unknown
  Description of Unknown: RightRegion for integrase B5011 sequence
gcgcccggctcttctggtggttcggatttaaaacgccccgctctgcgtctatgctgttgatataaacgcctgctgctttcaatacctcttttgtcttatcaagctgcacctcaaaatcgcccttatggaaaagcgtaactctatacatttccctgcgctctttctcttcgtcgtctgcatttaccgcaggcgtacccagcagccgcagaaacgtataatatgcgtctggcttatcccgtccagtgtaaacgcctctctgg

SEQ ID NO: 31011 - DNA, 260 bp, Unknown
  Description of Unknown: RightRegion for integrase B5012 sequence
aaagaggacgaaatgtccgtggaactccttggcgggcttcgattcagagaacgcatataggaggcactcatgaaaaagatacggtacatcccatacggatacacgatgcgaaatggcagaacggtcatctcaactgaggaagcagagatcatccgagagatctttaaggcatatctggagggcgcttctctcaaagcaattgcggaagaactgaccggtcgccagatcccatatacgcaaaagaccaccacatgggataa

SEQ ID NO: 31012 - DNA, 260 bp, Unknown
  Description of Unknown: RightRegion for integrase B5013 sequence
aaagagggcgaaatgtccgtggaactccttggcgggcttcgattcagagaacgcatataggaggcactcatgaaaaagatacggtacatcccatacggatacacgatgcgaaatggcagaacggtcatctcaactgaggaagcagagatcatccgagagatctttaaggcatatctggatggcgcttctctcaaagcaattgcggaagaactgaccggtcgccagatcccatatacacaaagaaccaccacatgggataa

SEQ ID NO: 31013 - DNA, 260 bp, Unknown
  Description of Unknown: RightRegion for integrase B5014 sequence
aacaccctattctttatagggacactgttcggacaaacaacaaaacaccgagtagagtaataagctctgcccggtgttttgttgttggtgggtagagcgggtagagaaaaatcgcaatttcccataaactctcttatagtagctctcttatagaacactttatgaaaaatacagatttactctacccactctacccgtaaggaggaatatatactcaacagcctgtcggctgagtgagccgtttaggactttttcagttc

SEQ ID NO: 31014 - DNA, 260 bp, Unknown
  Description of Unknown: RightRegion for integrase B5015 sequence
gcggcggctggcgaactgtccaaaaagttcgcacaaggtcacgtcacctccatacaatagaaaaccgctctgtcgcagcaatacggcagggcggttttcttgtttgcagttctatgagatggtgaagattattctggcagatctggagccggttcaaaggtggaaaattactgctcctcaaaccttgaaagtgctagaaatcaaggtttcatgcgggttaatgccgtgatacattcgcaatggcttgagggttgcgtttg

SEQ ID NO: 31015 - DNA, 260 bp, Unknown
  Description of Unknown: RightRegion for integrase B5016 sequence
aatcagcatgaactggaatttcacttgatcggtggattgaagtttaaagaaaaaatatagaccgcattgacattttagcgtaattgtgataaaatatattcaggaggcgatgattatggatatgaatatgatcagacctgtttcggatttaagaaacaattttgccgatatttcaaagaccgttcacgaaaccgcacagcctgttttccttacaaaaaacggttacggcgatatggtagttatgagtatggaagcgtttg

SEQ ID NO: 31016 - DNA, 260 bp, Unknown
  Description of Unknown: RightRegion for integrase B5017 sequence
aaagaggatgaaatgtccgtagaattccttggtggactacgattcagggaacgcatataggaggcagtcatgaaaaagacgcggtatatcccatacggatacacaatgcgcaatggtagaacggtcatctccggagaagaagcggaagttatcagagaaattttcaaatcgtatctgaacggagcttccttgaaagcgattgctgacgagttgaccgaccaccagattccttatacgcaaaagagcgctatatgggataa

SEQ ID NO: 31017 - DNA, 260 bp, Unknown
  Description of Unknown: RightRegion for integrase B5018 sequence
aacgctgaccgctgcaatttcacgcttaacgtgacgccgctctttccggaaacagattaaaggcagtcggaaggctgtcttttttactgtcgaaatctggttcttgatttcctgatgaaaaaccttgactattcgttacgaatatgataaaatgattgagaggtgattctgtatggaaaccagaacagcaaggctcagcgtggggcattccgggggaactgccggagccgggagccgtaattataaagtcactctgccga

SEQ ID NO: 31018 - DNA, 260 bp, Unknown; identical to SEQ ID NO: 30842
  Description of Unknown: RightRegion for integrase B5019 sequence

SEQ ID NO: 31019 - DNA, 260 bp, Unknown
  Description of Unknown: RightRegion for integrase B5020 sequence
gccgctgcaaaaagcctagaagtttcaacgacttccgggcttttttgcgcccatttttagaggcgtgacaaaaagatgccaaaatgggctttggcaaattcgatggacctgtacctttacccaaggctttttgagccgcttttctgaggacttttcggaaaagcggctcttttttgtcctcggcaaagtgtagaatttcgaccggcgtttttgttggttatgccgaatgcgcactccaagcacagatgccggcacgttag

SEQ ID NO: 31020 - DNA, 260 bp, Unknown
  Description of Unknown: RightRegion for integrase B5021 sequence
gaactgtccaaaaagttcgcacaaggtcacgtcgcctccaccagtacaaaagccatctgaaaacgtaagttttcaggtggcttttgctatatctgctattccgtgcttttctgtcacgccagatctggcaggatatccgaccacagagcctgctcctgccgcaaggcatcaaagcagcagtccagatacattttgttgaccgccgcaaaaatggtgctgcgcagcagcagacgctcgtcgttgagcacagtctccggctg

SEQ ID NO: 31021 - DNA, 260 bp, Unknown; identical to SEQ ID NO: 30842
  Description of Unknown: RightRegion for integrase B5022 sequence

SEQ ID NO: 31022 - DNA, 260 bp, Unknown
  Description of Unknown: RightRegion for integrase B5023 sequence
aaggcagaccgcggcgaagggttcgtatgctgcgcgtcttgccctatttacaaatattaggccgttttatgtgggcggctggatggaggtaataatgagattaaaacaaacgttacttacaattgtgctcagcctttgtatggttgcagcaagtctgccaaatattgtttcggcagatgttaagccgcaggaccgttggacggattatgcagcagcttcttttgacggaggctgggtaccaaagccgacccttacaagat

SEQ ID NO: 31023 - DNA, 260 bp, Unknown
  Description of Unknown: RightRegion for integrase B5024 sequence
gcgcccggctcttctggtggttcggatttaaaacgccccgctctgcatctatactgttgatataaacgcctgctgctttcaatacctcttttgtcttatcaagctgcgcctcaaaatcgcccttatggaaaagcgtaactctatacatttccctgcgctctttctcttcgtcgtctgcatttaccgcaggcgtacccagcagccgcagaaacgtatagtatgcgtccggcttatcccgtccagtgtatacgcccctctgg

SEQ ID NO: 31024 - DNA, 260 bp, Unknown
  Description of Unknown: RightRegion for integrase B5025 sequence
aacaccctattctttatagggacactgttcggacaaacaacaaaacaccgagtagagtaataagctctgcccggtgttttgttgttggtgggtagagcgggtagaggaaaatcgcaatttcccataaactctcttatagtagctctcttatagactactttatgaaaaatacagatttactctacccgctctacccgtaaggaggaatatatactcaacagcctgtcggctgagtgagccgtttaggactttttcagttc

SEQ ID NO: 31025 - DNA, 260 bp, Unknown
  Description of Unknown: RightRegion for integrase B5026 sequence
acggcggctggcgaactgtccaaaaagttcgcacaaggtcacgtcacctccaccaactgaaagggcgagggtatttggtactgttattttcggacagtatcggatactctcgcctttatttttgttgctgatatgattcttcaaattgatttggggtttgctgtttaagacattcatgcggtcggtaatcgttataaaaatcaatatattctgatagactttcctctaattcggagacagtttcataaaaatgaaatttg

SEQ ID NO: 31026 - DNA, 68 bp, Unknown
  Description of Unknown: RightRegion for integrase B5027 sequence
gactgttcgactgagaagcaaatggtccgagtggcgagaatcgaactcacggcctcttgaaccccatt

SEQ ID NO: 31027 - DNA, 260 bp, Unknown; identical to SEQ ID NO: 31003
  Description of Unknown: RightRegion for integrase B5028 sequence

SEQ ID NO: 31028 - DNA, 260 bp, Unknown; identical to SEQ ID NO: 31017
  Description of Unknown: RightRegion for integrase B5029 sequence

SEQ ID NO: 31029 - DNA, 260 bp, Unknown
  Description of Unknown: RightRegion for integrase B5030 sequence
aacaccctattctttatagggactctgttcggacaaacaacaaaacaccgagtagagtaataagctctgcccggtgttttgttgttggtgggtagagcgggtagagaaaaatcgcaatttcccataaactctcttatagtagctctcttatagactactttatgaaaaacatagatttactctacccactctacccgtaaggaggaatatatactcaacagcctgtcagctgagtgagccgtttaggattttttcagttc

SEQ ID NO: 31030 - DNA, 260 bp, Unknown
  Description of Unknown: RightRegion for integrase B5031 sequence
gaaagcgacctctcaataaccctgcacccggtcgtcacttcttcaaaccctcaccgataacatcaatgtacgggtgaacttgcacacatggagatgatctccagcattctttatcagctgacccgtaatcttacgccggagcaaatccgcgagggcggcttcgatgcctactttatcgatcatacaaccggtatttatcctcagtctgccgccggtatcccgtggtcggccgcaaccttccagtccaagggcgaccccat

SEQ ID NO: 31031 - DNA, 260 bp, Unknown
  Description of Unknown: RightRegion for integrase B5032 sequence
aacaccctattctttatagggacactgttcggacaaacaacaaaacaccgagtagagtaataagctctgcccggtgttttgttgttggtgggtagagcgggtagagaaaaatcgcaatttcccataaactctcttatagtagctctcttatagactactttatgaaaaacatagatttactctactcactctacccgtaaggaggaatatatactcaacagcctgtcggctgagtgagccgtttaggattttttcagttc

SEQ ID NO: 31032 - DNA, 76 bp, Unknown; identical to SEQ ID NO: 30950
  Description of Unknown: RightRegion for integrase B5033 sequence

SEQ ID NO: 31033 - DNA, 91 bp, Unknown
  Description of Unknown: RightRegion for integrase B5034 sequence
cgctcttccggctccaccaaaaggtggcaacaatttggatattttaagcgcaacgcttagaataccaaagggttgccacctttttttattt

SEQ ID NO: 31034 - DNA, 260 bp, Unknown
  Description of Unknown: RightRegion for integrase B5035 sequence
gcggcggctggcgaactgtccaaaaagttcgcacaaggtcacgtcacctccaccaaatgaaagggcgagggtatttggtactgttattttcggacagtatcggatactctcgcctttatttttgttgctgatatgattcttcaaattgatttggggtttgctgtttaagacattcatgcggtcggtaatcgttataaaaatcaatatattctgatagactttcctctaattcggagacagtttcataaaaatgaaatttg

SEQ ID NO: 31035 - DNA, 260 bp, Unknown
  Description of Unknown: RightRegion for integrase B5036 sequence
gaacccgtcagccttcccggtgggttcggactcatcatcccgctacgccgcgccgcctaagcctctagactgcgctgggtcgattctaccacggctagatcacgagtttctgacccgcgtagatgatgttcgggttgctgatgccgttcttggatgcgatggcctgataggtggtgccgaacttggccgcgatgccggagagcgtgtcgccgcttttaaccgtataggtggttgacttgcccttgccgttgatgatgtcc

SEQ ID NO: 31036 - DNA, 75 bp, Unknown; identical to SEQ ID NO: 30957
  Description of Unknown: RightRegion for integrase B5037 sequence

SEQ ID NO: 31037 - DNA, 260 bp, Unknown
  Description of Unknown: RightRegion for integrase B5038 sequence
gaaagcgacctctcaataaccctgcacccggtcgtcacttcttcaagccctcaccgataacatcaatgtacgggtgaacttgcacacatggagatgatttccagcattctttatcagcttactcgtaatcttacgccggaacaaatccgcgaaggcggcttcgatgcctactttgtcgatcatacaaccggtatttatccgcagcctgccgccggtatcccgtggtcggctgcaaccttccagtccaagggcgaccccat

SEQ ID NO: 31038 - DNA, 260 bp, Unknown
  Description of Unknown: RightRegion for integrase B5039 sequence
ggatgccgtgcgtctcgctccagcgtttgccattgcatccggtcggtgtcatacatatagatttttccgttggctccccggtaccagacgaacacgccggggacccattggcggttgtatccgtcccacacgtccaggccccagaagcgcaggatgcacccgtctccgaactccagctccgcgtccggcgcagaatcgggggcgctgctctggcgcttgcccatgccggcggcattcacctccagatacagccgggaggc

SEQ ID NO: 31039 - DNA, 260 bp, Unknown; identical to SEQ ID NO: 30993
  Description of Unknown: RightRegion for integrase B5040 sequence

SEQ ID NO: 31040 - DNA, 100 bp, Unknown; identical to SEQ ID NO: 31000
  Description of Unknown: RightRegion for integrase B5041 sequence

SEQ ID NO: 31041 - DNA, 260 bp, Unknown
  Description of Unknown: RightRegion for integrase B5042 sequence
ggctgttcgactgagaagcaaatggtccgagtggcgagaatcgaactcacggcctcttgaaccccattgtgcttctctcaaaaacgcaatggacactccaataccacttgtacgcagtatcatcaaatttcaaaattattttatcattctgtttcgttagatgtcaagatgtttcgtttcttttgtggtcaaattgtggtcaaccgaccctgacaaatgaccattctcccctactaagttacatggcgcaattccgattt

SEQ ID NO: 31042 - DNA, 260 bp, Unknown
  Description of Unknown: RightRegion for integrase B5043 sequence
cataatccgaacatttactttactaaagactttatcattttggattatgtatttaagtaaagaaaaagacaaggttttaacgccttgccttttttgttgtttcatatccacaatattttagtagtgcttctttctctgacttggttaagtttagtctttgaatatagctcttaactttattttcgccaacggcgtttttgtagcctagatagcccataacaagatatttttctgctgcagttaagttttgtttagcaaca

SEQ ID NO: 31043 - DNA, 260 bp, Unknown
  Description of Unknown: RightRegion for integrase B5044 sequence
aatccgaacatttttgtaacgcttgacgtgttcgggttagtcgttcagattgaacgctaaagaaataaccccgctttccggtaagggaaggcggggttattctcttttcctgctcatagctgcgcgaatagcaagcgccgccatgcagtaatttgttatcgcttcgttcttttgcctgtaaagctccgacaggctcaacccatacattgcttgcagttttgcccgatgtcccgcatagcggcaacgccgatctatgaaga

SEQ ID NO: 31044 - DNA, 76 bp, Unknown; identical to SEQ ID NO: 30931
  Description of Unknown: RightRegion for integrase B5045 sequence

SEQ ID NO: 31045 - DNA, 260 bp, Unknown
  Description of Unknown: RightRegion for integrase B5046 sequence
ggctttttgcttatctgctgcatgattgatgaggcaattctatgcacctttgggctataacaaaatggaagaagttttattccggcgtacctgtgcggcatagggacggcctgaggacgcgatttgaaaaaggcatagatgcggatttgcgcaatgcctgcattcgcttttgcgattgggcaaggcatgaatactgtttcccgatacgggtatgcgtttatttcaaaaaggatgagttgatacgcgccatggatggggaa

SEQ ID NO: 31046 - DNA, 260 bp, Unknown
  Description of Unknown: RightRegion for integrase B5047 sequence
gttgatttcggtaggaacaagggtggagaagtccacctggacgtctacctgaaagaatagaaaaaggcccccggcaactgccaggggccttgcttataggtcaatgtccaactcaaccgggcaatggtcgctgcccataatgtcgctatgtattttcgcatctatgatcttatcctttgcgcagtcatcgaccaggaaatagtcgatccgccaccccgcatttttctccctggcatggaaacggtagctccaccaggaat

SEQ ID NO: 31047 - DNA, 260 bp, Unknown
  Description of Unknown: RightRegion for integrase B5048 sequence
aacaccctattctttatagggacactgttcggacaaacaacaaaacaccgagtagagtaacaagctctgcccggtgttttgttgttggtgggtagagcgggtagagaaaaatcgcaatttcccataaactctcttatagtagctctcttatagactactttatgaaaaatacagatttactctacccactctacccgtaaggaggaatatatactcaacagcctgtcggctgagtgagccgtttaggactttttcagttc

SEQ ID NO: 31048 - DNA, 260 bp, Unknown; identical to SEQ ID NO: 30842
  Description of Unknown: RightRegion for integrase B5049 sequence

SEQ ID NO: 31049 - DNA, 260 bp, Unknown
  Description of Unknown: RightRegion for integrase B5050 sequence
cgctcttccggctccaccatgcgaaaagccaccccttgtgggtggcttttcgcatgctgaaacggagtggcgcgagaagtcctgcgggttcgaccgcatgcagtctgccgcgtttacacggccgctgcgcgaaacgcaactcgaggagtattctcttcagtttcatcagaaatccattataattttgataaaactacggcggcttctttgttgcacggcattttcgtggatggtataatgagcgttagagaaagtaattt

SEQ ID NO: 31050 - DNA, 70 bp, Unknown
  Description of Unknown: RightRegion for integrase B5051 sequence
ggctgttcgactgagaagcaaatggtccgagtggcgagaatcgaactcacggcctcttgaaccccattca

SEQ ID NO: 31051 - DNA, 260 bp, Unknown
  Description of Unknown: RightRegion for integrase B5052 sequence
ggtgcaccaaagaatgccttacacgaaagtgtagggcatttttttgttgctctattttaagaaggcacgatctggtgcagcgtcggagatactcgaacagggcggcggcacgcagtgccgtaaggaacgccacagtgcggcgttccttagcccgcgggagagtccccgggaatgtggcgggtgtggaaaggcgaggcgatggggagaggcagggccttgaaatagaaaaagtgcaagtttgcaagagtgtttatggcaac

SEQ ID NO: 31052 - DNA, 260 bp, Unknown
  Description of Unknown: RightRegion for integrase B5053 sequence
gagggggacaagttcatttgtgatgtatcttgtcccgccaaacagaaaaccactagctgagctagtggaaagaaaaagcctcaggctatggacaaaaataaaactccttgttaaggtaaagttaggtttgccgaccaacaagaccagaaacaaggaggaccttatcgtggataaggacataagtagtttagagcatacacggtggagatgtcaataccatgttgtgtttgcgccgagaagcaatgaagaaagaatcttgt

SEQ ID NO: 31053 - DNA, 260 bp, Unknown
  Description of Unknown: RightRegion for integrase B5054 sequence
gttgatttcggtaggaacaagggtggagaagtccaccttgacgtctacctgaaagaataacaaaaagaggggctggcgttatgccagccccttgctttgcaactctttttttatgagcaactcgacgtagttactcacgttccgcccgtccgcgtcggccagcttttgcagctgggcctttaactcaggcgtcactcggatttgtaggcgttcagttttcatttttttctgcatccctttcgtttttttacagggtacac

SEQ ID NO: 31054 - DNA, 260 bp, Unknown
  Description of Unknown: RightRegion for integrase B5055 sequence
aaaaaggacgaaatgtctgtagaactccttggcgggcttcgattcaaagaacgcatataggaggcagtcatgaaaaagatacggtacatcccatacggttacaccatgcggaatggcagaacggtcatatccagcaaggaagcagaagtcatccgcgagatcttcaaggcatatctgggtggcgcttccctcaaaactatcgcagaggaattgaccggtcgccaagtcccttatacacaaaaaaccgccacatgggacaa

SEQ ID NO: 31055 - DNA, 77 bp, Unknown
  Description of Unknown: RightRegion for integrase B5056 sequence
ggctgttcgactgagaagcaaatggtccgagtggcgagaatcgaactcacggcctcttgaaccccattcaagcgcgc

SEQ ID NO: 31056 - DNA, 76 bp, Unknown; identical to SEQ ID NO: 30931
  Description of Unknown: RightRegion for integrase B5057 sequence

SEQ ID NO: 31057 - DNA, 260 bp, Unknown
  Description of Unknown: RightRegion for integrase B5058 sequence
gcgcccggctcttctggtggttcggatttaaaacgccccgctccgcgtctatgctgttgatataaacgcctgctgctttcaatacctcttttgtcttatcaagctgcgcctcaaaatcgcccttatggaaaagcgtaactctatacatttccctgcgctctttctcttcgtcgtctgcatttaccgcaggcgtacccagcagccgcagaaacgtataatatgcgtctggcttatcccgtccagtgtaaacgcctctctgg

SEQ ID NO: 31058 - DNA, 109 bp, Unknown
  Description of Unknown: RightRegion for integrase B5059 sequence
aaaggtcgtggtcacgaagatgactttaaactgaccatttatcctattatctcaaaataagtttgtttaccgatataaacgtgggtttgatgaacttaatcacctagaa

SEQ ID NO: 31059 - DNA, 260 bp, Unknown
  Description of Unknown: RightRegion for integrase B5060 sequence
aaaagaaacgtcaaggcgatcaacatgttaagcctgcaaatctatccgcaaaccccgtaattttttatcgtcaacatcaagtttagaattcgttgtaaacatcatgatgacaataaaatgccccgaaccgaaatggtcggggcatttattattatttactgacagggcgacgtatcctgcatatcaggttaccttgcggattgtcggaactcatgcattatctatatagcctcataggcagacgcttgtaccattctcat

SEQ ID NO: 31060 - DNA, 75 bp, Unknown
  Description of Unknown: RightRegion for integrase B5061 sequence
gactgttcgactgagaagcaaatggtccgagtggcgagaatcgaactcacggcctcttgaaccccattcaagcgc

SEQ ID NO: 31061 - DNA, 260 bp, Unknown
  Description of Unknown: RightRegion for integrase B5062 sequence
aaggcagaccgcggcgaagggttcgtatgctgcgcgtcttgccctgttattaaaccttgaagcgatatagttgtttcaaggttttttatgtttaataataaaaagatatgtattacaatgggaataaagtgtttattggtaattataatgaaataaatttgtatttcaaaatggattacaaatgtaaggaggatttttaatgaaggaaaagcttaagattaatgttacaaagccacaatatgtgcagatatctgatatta

SEQ ID NO: 31062 - DNA, 189 bp, Unknown
  Description of Unknown: RightRegion for integrase B5063 sequence
gttgatttcggcaggaacaagggtggagaagtccacctggatgtctacctgaaagaataacaaaaagaggggcgggcgttatgccagccccttactttgcagctcttttttaatcagcaactcaacgtagttactcacgttccgcccgtccgcgtcggccagcttttgcagctgggatttcaactcggg

SEQ ID NO: 31063 - DNA, 260 bp, Unknown; identical to SEQ ID NO: 30842
  Description of Unknown: RightRegion for integrase B5064 sequence

SEQ ID NO: 31064 - DNA, 260 bp, Unknown
  Description of Unknown: RightRegion for integrase B5065 sequence
tcatatcaacaacaagctgaaattattaacggaaaattagtcatttctttcttgttgtaaacagaaatcccccggtattttctaccgagggattttgttttttgagcggattataagatgtcgtcaattttacacttcaaagcctcagctaaggctttcgccattcgcagcgtcggttcgtgcgttccgttttcccatcttgctacacacacttgagaacaccctattttttcagcaagttcaacttgtgttaggcccgc

SEQ ID NO: 31065 - DNA, 260 bp, Unknown
  Description of Unknown: RightRegion for integrase B5066 sequence
gaacgcagtcaacaagtacatatttattacaaagagattggcaaaatcaaccttgagtaaattttgtacccaaacagtaacgccctaaaggcagtgcatttatgcacaacgcattgcgactatatttcagacgggaggatatcatccgcccgcattgatgaaatattatgtttaaataaaatcatttgatgttatcaaagttgtgtgtttaaatgtcaaagattgtaaaaacagagagtaccgctcgggttgcatagttt

SEQ ID NO: 31066 - DNA, 76 bp, Unknown; identical to SEQ ID NO: 30931
  Description of Unknown: RightRegion for integrase B5067 sequence

SEQ ID NO: 31067 - DNA, 260 bp, Unknown; identical to SEQ ID NO: 30846
  Description of Unknown: RightRegion for integrase B5068 sequence

SEQ ID NO: 31068 - DNA, 260 bp, Unknown
  Description of Unknown: RightRegion for integrase B5069 sequence
aaccgaacaaaatgggattccagcaaaccggaattaaagatttattttcatgatttttgatcttatttttatagcgtacagcatcgtggaactaattcattagttccatgatgttatctgttaacaaaaagcactcttttgagtgctttttattaacctgcctgattctgcaacccttggatcacttcttccagttccgccacctttgactgaagcttttccacctgttcgatcacagtttccgctttttctccatccac

SEQ ID NO: 31069 - DNA, 260 bp, Unknown
  Description of Unknown: RightRegion for integrase B5070 sequence
gaaagcgatattcaaatctatatgaattgctttgataaaactatgacacacaagagatagaataaatctatctcttaactgtgcatgtcactatggtgcagatgaggtgatcactttttgacatacacgaattatatgctatttcactttgtaatagggatgtttaaataaacgattacatcttcttcatttactattatttcatttactataagatccatcagctcttttaattgtggaactgatttttcctttaacat

SEQ ID NO: 31070 - DNA, 260 bp, Unknown
  Description of Unknown: RightRegion for integrase B5071 sequence
aaatccacgaacaccatctacttaacgccttcctacttctacatactggcgagactataaaagcctgtctcgcaccatgatagggattgaggcaggcattgatgttggcacttcgcagggagattttcagtaattgtttaatttacagttcgacgcgctgtaaaaataaaaacctaagaaaatcagtcatatatgtaaataaataaaataagaaacgtgttgtttggcacaagaggttcgcttatttccctgcgaagcgc

SEQ ID NO: 31071 - DNA, 109 bp, Unknown
  Description of Unknown: RightRegion for integrase B5072 sequence
ccggataataaaaaatcagcagccgaatgttcgactgctgatggagatggtggagcataggagattcgaactcctgacctcgacaatgcgaatgtcgcgcgctaccaac

SEQ ID NO: 31072 - DNA, 260 bp, Unknown
  Description of Unknown: RightRegion for integrase B5073 sequence
aatagggataatattcaaatttacatgtgttttgataagaagtttatacaagaacggtaaaatgcttattttgtgtccatcaaaatggctccactctggaggagccataatcggaacaagttatcttgttccgatttttttgtgttctcaaatattttgtaattcgatattttaattaattcaattcactttttgttgaaatacttacattatttgctaccaagtttccggaataagctaccacttagtcggaaaatgtt

SEQ ID NO: 31073 - DNA, 260 bp, Unknown
  Description of Unknown: RightRegion for integrase B5074 sequence
agcagaaaggaagtcggattcgccatgaagtgcggccccgtcttccgggaaaggatatgaggctatggaacacacaccgttcggatatgtgatcgttgacggcagaccgaaagtacacgatatggaggccgcgaggcttgccgcgctctactcggcataccttctcggaatgtcgtacgaaaatgccgccgaggtggcaggcatcaaagcgactcacagcatgatcaagcgtctgcttcacaataaacggtatcttgggg

SEQ ID NO: 31074 - DNA, 109 bp, Unknown
  Description of Unknown: RightRegion for integrase B5075 sequence
aaaatcgacctcgaaaacaatcatatcgatattgaatataggatcaaactgtttagttaattgtgaatatcacatcgatcccgaagtatccatcatggctataatgaca

SEQ ID NO: 31075 - DNA, 260 bp, Unknown
  Description of Unknown: RightRegion for integrase B5076 sequence
gaatctacgaacaccatctacttaacgccttcctacttctacatactggcgagactataaaagcctgtctcgcaccatgatagggattgaggcaggcattgatgttggcacttcgcagggagattttcagtaattgtttaatttacagctcgacgcgctgcaaaaataaaaacctaagaaaatcagtcatatatgtaaataaataaaaataagaaacatgttgtttggcacaagaggttcgcttatttccctgcgaagca

SEQ ID NO: 31076 - DNA, 260 bp, Unknown
  Description of Unknown: RightRegion for integrase B5077 sequence
ccagacaataaaaaaacagcggtcgaatgttcgaccgctgataaaaatggtggagcatagcggattcgaagcggagaacgcacttcccattgcgtcccaatcagtaccatatggtaacattctgaaaccaaaatcagcatttgcagcttaacaaatcacatggaataccactccgttgtgggtacaattgtgggtacgcatcgtggtgcagtgtcgaggaaacacagacaatatccaagtttccggctaacctataatga

SEQ ID NO: 31077 - DNA, 109 bp, Unknown
  Description of Unknown: RightRegion for integrase B5078 sequence
atagacaaaatcaagtgggatggcgaaaaattcaagatttcttttataaaaaaatcataggaattaacagagtactgcaccacctggtcttccgccaataatatcttta

SEQ ID NO: 31078 - DNA, 109 bp, Unknown; identical to SEQ ID NO: 31071
  Description of Unknown: RightRegion for integrase B5079 sequence

SEQ ID NO: 31079 - DNA, 260 bp, Unknown
  Description of Unknown: RightRegion for integrase B5080 sequence
gttgattttggtaggaacaagggtggagaagtccacctggacgtctacctgaaagaatagaaaaaggcccccggcaactgccaggggccttgcttataggtcaatgtccaactcaaccgggcaatggtcgctgcccataatgtcactatgtattttcgcgtctacgatcttatccttggcgcagtcatcgaccaggaaatagtcgatccgccaccccgcatttttctccctggcatggaaacggtagctccaccaggaat

SEQ ID NO: 31080 - DNA, 260 bp, Unknown
  Description of Unknown: RightRegion for integrase B5081 sequence
ttccgaaacgaaaaccccgccgaatatcttacgttgactatctatcccattgtggattaattttttgcagagaatagagacaaccttgtggtcgcgattcatcgcgaccacaaggctcccactattattttgctacttccagccatcgatcatcgccttaacctcggcggtcttggcgatgaggtcgttgtggatggcttcccacgcggcgatcatgccgtcggcgtaggcgggcttttgcttgtactcctcggaggcct

SEQ ID NO: 31081 - DNA, 260 bp, Unknown
  Description of Unknown: RightRegion for integrase B5082 sequence
aaaaacaatgcactgacaccaaacttcgagctgcacatctacccgaacttgatggattgattgtgcgcataacatatatgattaacgtccatatgtatatgcacatgtatgatatatgttaatttaatctgcccacacacgcacaaagacacaaaaaaaggcggggtaatttccaccccgccttaaattgatgcactactttaatttttcatatagtcggctcaccactgccgcgacctcagcgcgtgtgatgggcgcat

SEQ ID NO: 31082 - DNA, 260 bp, Unknown
  Description of Unknown: RightRegion for integrase B5083 sequence
gttgttgaaaagttcgtacaccgtgcgtcatgctccaccaaaaagcactgtacttcgtaggaagtatggtgcttttctttttgctgaagccgatttttgggggctgcattgcttcgcctgcaccgttttcaggcttttgcaggcggttcctatataacctccaatttttgactttacaccgttttcaaaaaggaatgtttgccgcccggtttttcagcaggctgctgcatcatccccttcaatgtacggcgtaaggtcga

SEQ ID NO: 31083 - DNA, 260 bp, Unknown
  Description of Unknown: RightRegion for integrase B5084 sequence
aacacgatattgtttcttggtcatgttatggtttatacaacaaaataccggacgaattagttttcgtccggtatttttgttatttgcatcattcggtatttccatcattgtcaacgtcatcgttatgtacgggggtgcgtttctctgcactctgctcctgcccctctccggattcggaaaagccgggtaattcaattttcgtgatgtcctcaccgctcgccgccgctttcatcaactgtttgaaaatttgatttgttccg

SEQ ID NO: 31084 - DNA, 260 bp, Unknown
  Description of Unknown: RightRegion for integrase B5085 sequence
aatgcaccagctcggtggagccgaggtccgagaagtacgagcctgtatgcccgccgataaagaccgtgccgttctcgccgggcagcacacagtcactctcggatcggcagcctgcaccgcggctgaactgggtctcgctgtcgccccaatagaggtcgcagtcgacgtcggttccctcgatccagatgcggcccagcttatcgccgtactggatgcggtcgcgggcattcagggcagcggctatctgttccgtacgcttg

SEQ ID NO: 31085 - DNA, 260 bp, Unknown; identical to SEQ ID NO: 30914
  Description of Unknown: RightRegion for integrase B5086 sequence

SEQ ID NO: 31086 - DNA, 194 bp, Unknown
  Description of Unknown: RightRegion for integrase B5087 sequence
aaatccacgaacaccatctacttgacgccttcctatttctatgtgctggcgagattataaaagcctgcctcgcaccatgatagggattgagacaggcattgatgttggcacttcgcagggagattttcagtaattgtttaatttacagttcgacgcgctgtaaaaataaaaacctaagaaaatcagtcatatat

SEQ ID NO: 31087 - DNA, 260 bp, Unknown
  Description of Unknown: RightRegion for integrase B5088 sequence
gaatctacgaacaccatctacttaacgccgtcctacttctacatactggcgagattataaaagcctgcctcgcaccatgatagggattgaggcaggcattgatattggcacttcgcagggagattttcagtaattgtttaatttacagttcgacgcgctgtaaaaaataaaaacctaagaaaatcagtcatatatgtaaataaataaaataagaaacgtgttgtttggcacaagaggttcgcttatttccctgcgaagcg

SEQ ID NO: 31088 - DNA, 260 bp, Unknown
  Description of Unknown: RightRegion for integrase B5089 sequence
aaatccacgaacaccatctacttaacgccttcctacttctatgtgctggcgagattataaaagcctgcctcgcaccatgatagggattgagacaggcattgatgttggcacttcgcagggagattttcagtaattgtttaatttacagttcgacgcgctgtaaaaataaaaacctaagaaaatcagtcatatatgtaaataaataaaataagaaacatgttgtttggcacaagaggttcgcttatttccctgcgaagcgc

SEQ ID NO: 31089 - DNA, 260 bp, Unknown
  Description of Unknown: RightRegion for integrase B5090 sequence
tcaggactttcggatgtgtcaaaaagttcgcctatactctccaacggtcaaccagactaaagccatctgaggaaactcaggtggcttttctgtttgtatgattccgcgcggcgcaacgattcagaatgccctccgctttgctctgggcattttcagcggaaggattattttaatatttcgcgtttgtcgcactctgcggagtgctccaaacgctattttcacaggaggggccgcaatggttaaagagcagtctaaatcac

SEQ ID NO: 31090 - DNA, 260 bp, Unknown
  Description of Unknown: RightRegion for integrase B5091 sequence
gaggtactcgataattataaggtcagggatgagataaggagggtttatgttagcgagtaatgtaaaagtaattcaaccaagaaaattattcaatatagaagagagcgcaaggcagcttttaagggttgcgggatatgctcgtgtgtccacggggagacctgaacagaaaaccagttttgagtcgcagcaaaagcattataaagagttggtggcgaagcactcggattggatagatgtcggtttgtatgccgatgagggca

SEQ ID NO: 31091 - DNA, 260 bp, Unknown
  Description of Unknown: RightRegion for integrase B5092 sequence
aatactccagatagggaatccaagtactatctcatcataattctcaatgtgtgcatttgaatcatcaagctccggtctaagcttcttgtcgctcatctcgacgctgctcctggatttcttgttcatccagtcgaggtcagccttggtgtacagctcctttggtttgatctcgtacaaatctgcgcctgctgcctccgatatcatctctgcaacctttttcgtggttccacttgcgctgaaatatgctataagcttttttg

SEQ ID NO: 31092 - DNA, 260 bp, Unknown
  Description of Unknown: RightRegion for integrase B5093 sequence
gtcagctccaccacgatggagtcgaactccgggtcgccccccacgcgggggcgtgagtagaaattctttcctctgacggcgctcccatgctgacgatgtcgccccccacgcgggggcgtgagtagaaatatgaatgtattccaccatgtccacccactccttacgtcgccccccacgcgggggcgtgagtagaaattggcagcgcaatgcccaaattggggaaatgggtaggtcgccccccacgcgggggcgcaagtaga

SEQ ID NO: 31093 - DNA, 260 bp, Unknown; identical to SEQ ID NO: 31087
  Description of Unknown: RightRegion for integrase B5094 sequence

SEQ ID NO: 31094 - DNA, 260 bp, Unknown
  Description of Unknown: RightRegion for integrase B5095 sequence
gaggtgctggatttttataaaacgagagacgaaataaggagggtctatgttaccgagtaatgtgaaaataattaaaccgcgcgctcaagtggtgattgatgagcaaccgcttattcaatacataagggtggcgggctatgcaagggtatccacagggaaaccggagcaaaagacgagctttgagtcacaacagaaacattataagagtttggtcgctcgccaccccgattggattgatgtcggtctgtacgccgatgagg

SEQ ID NO: 31095 - DNA, 260 bp, Unknown
  Description of Unknown: RightRegion for integrase B5096 sequence
aatactccagatagggaatccaagtacgatctcatcataattctcaatatgtgcatttgaatcatcaagctccggtctaagcttcttgtcgctcatctcgacgctgcttctggatttcttgttcatccagtcaaggtcagccttggtgtacagctcctttggtttgatctcgtacaggtctgcgcctgctgcctccgatatcatctctgcaacctttttcgtggttccacttgcgctgaaatatgctataagcttttttg

SEQ ID NO: 31096 - DNA, 64 bp, Unknown
  Description of Unknown: RightRegion for integrase B5097 sequence
tcaggtacgtatggtgccgaaggccggactcgaaccggcacgtggggtaaccacgcttgatttt

SEQ ID NO: 31097 - DNA, 260 bp, Unknown
  Description of Unknown: RightRegion for integrase B5098 sequence
caacatgagttggaatttcacttgatcggcggattgaaatttaaagaaaagataaaatagacaaattcattatcatagatttagtgcctttggatatagctatttcaaaggctttgtggtattgttataagcggaggtgacattaatatggcaaaaaacagagtaataccgtttggttactgcatgaagaacggagtgataacaactgatcccaaagaggtatgcgctgttgcgacgattttcagtgaatatctttcagg

SEQ ID NO: 31098 - DNA, 260 bp, Unknown
  Description of Unknown: RightRegion for integrase B5099 sequence
accttgtttttcgtcaaacattgcttcggatttgttatgaacatagaggaggtaggctgattatgcctacctcctcttgttgtgtgaagttattgttcttgttcttggcgaagtagttaaagtagttgttcttgggtttttgcgtgtaacttttgcttagtatgcgcatatatagagaaagtttacgcaaaaaccgattttgaactacttttactacttctgctcggcctgtttcagctccaagacagcggactcaatga

SEQ ID NO: 31099 - DNA, 109 bp, Unknown
  Description of Unknown: RightRegion for integrase B5100 sequence
gaaagcgacctctcaataaccctgcacccggtcgtcacttcttcaagccctcaccgataacatcaatgtacgagttcttcggtaccaatatcggtaaggattcccttgc

SEQ ID NO: 31100 - DNA, 260 bp, Unknown
  Description of Unknown: RightRegion for integrase B5101 sequence
aatgaaaatccggcggccgctctctccctccgtctctatcctcggaggcatataaaataaaggggtatcatgtggggaaggattcgtcgcacaccgaatccgcaaactcttcacacggcggcacttcgcagtagccgtagctcggcacaagaatctccaccttagccagcaccttgagcacgacggtcacgcagatttccagctcaaacacattgttgcgcagatatgtaccggatacgcagatcgcggaaaccatcgat

SEQ ID NO: 31101 - DNA, 260 bp, Unknown
  Description of Unknown: RightRegion for integrase B5102 sequence
gccggaagtcgcttccggctctattatcctcgagcggagcaaacccacctttccgcttagtataggatcttgctataggatcttgccatgtttgacggtaaaatgacgaaaggtcaacttttgcatatgctaaagaagctatgcgaacttgccggaaggcgcgaggaagggataggggaaaatggaaaagttctgttccgcttggtggcgtatttcgccaaagagggcaatggccgagccgaacggagaagagaataagc

SEQ ID NO: 31102 - DNA, 260 bp, Unknown
  Description of Unknown: RightRegion for integrase B5103 sequence
tccaatgcaccaccaaagttgtccgttcgattccgtacctcatacgaatcgcagggctgaaattcatatcgtaccgcgtaaaatcaaaaagaaagagtaacatttctagggaacgaaaatttggcacctaaaaatgttactcttttatatccctaaaaatgttactaccggactacgttaaagccaatggaagaggtcggtttttgagcaaagaatcacttccaaatacgggtcagattcggtcggaattgcagtgtaaa

SEQ ID NO: 31103 - DNA, 260 bp, Unknown
  Description of Unknown: RightRegion for integrase B5104 sequence
aattatagatctacagcttctagaaaactatatactaaagcacgtaaatgtgtaggttgaaatttaatcgctaatagtaattatattatcattttcaatattgtccagtatttcttttgagattgctatgcgttcttctggcgtatagcattttttccattccagttcacgaggatcttctactttttcgctccaatcttcatcaagcagctcattatcaatcattttatttatcctccaatcataagtgctatatttat

SEQ ID NO: 31104 - DNA, 260 bp, Unknown
  Description of Unknown: RightRegion for integrase B5105 sequence
ctcaccagctccaccaatttgccgcatcgttttgtacgatgcggcgttttttatgcctaaaaaacattggcagaccgtgccgggctccgaaccctgaagtcggatgcgaaccgggcggggtcatcaatatattttttgaaaatccatcggtttcacgcttctttctttgcattttgcagagtgctgcgggcaagcgcatcgcttttatgcccccttctcggaaatttcttcaaaaatctccgcaccatcgtaggtcgata

SEQ ID NO: 31105 - DNA, 260 bp, Unknown
  Description of Unknown: RightRegion for integrase B5106 sequence
gacaagcgctcttccggctccaccataaaagtttcgagattggttccgctacttttgtagagcttaacgatgccgatttggctttgacgaactctcgtctctcgtataatcaagccatatacgatttcttagcggcaaaatccgatttgcaattgctgttgggtaataccgatttggaacaatataaacaagtgaaaagccaagataagtaatacattcatagaataatataagaaaataaacatatgaaaagaaatcat

SEQ ID NO: 31106 - DNA, 260 bp, Unknown
  Description of Unknown: RightRegion for integrase B5107 sequence
aacgacacgccgccatatgtgctaccgaacaggatcaggctcgatgtccacctccggtagtctctataaccatgttttatgggtcgacgaagaaatacagcagctggctcaaattgaaaggagagtggaaatggaaaattattacaagggcagaagaatagctccctttagcggcaagatttacaacgtgtactgcgatgaaagctgccatttgcaaaacgatagatttaaggctatgtcaatcggagcggtttggtgtc

SEQ ID NO: 31107 - DNA, 260 bp, Unknown; identical to SEQ ID NO: 31106
  Description of Unknown: RightRegion for integrase B5108 sequence

SEQ ID NO: 31108 - DNA, 260 bp, Unknown
  Description of Unknown: RightRegion for integrase B5109 sequence
aacgaaaacccggcaaatgccctgaccctctccgtctatccccgcagatataaaaaataaagggatatcatgcagagaagaattcatcgcatacagaatccgcaaactcctcacacggcggcacttcgcagtagccatagctcggcacgagaatttcgacctttgccagcaccttaagcacgacggttacgcagatttccagctcaaacacgttattgcgcaaatatgtaccggatacgcagattgcggagaccatcgcc

SEQ ID NO: 31109 - DNA, 260 bp, Unknown
  Description of Unknown: RightRegion for integrase B5110 sequence
aatgaaaatccggcggccgctctctccctccgtctctatcctcggaggcatataaaataaaggggtatcatgtggggaaggattcatcgcacaccgaatccgcaaactcttcacacggcggcacttcgcagtagccgtagctcggcacaagaatctccaccttagccagcaccttgagcacgacggtcacgcagatttccagttcaaacacattgttgcgcagatatgtaccggatacgcagatcgcggaaaccatcgat

SEQ ID NO: 31110 - DNA, 260 bp, Unknown
  Description of Unknown: RightRegion for integrase B5111 sequence
agatcggaaatcgtattccaattgatcggcggtctaaaactgaccgaaagcatcgcatgaaaggacggcgaaaacagatatgaaaaacaggaacatacccttcggatacagattcgaaaacggaaagatcattatcagcgctgacgagcataccacacttcagcgaatctgctccgaatacctcgacggacggtcactcctgcagattgcaaatggattgcagacagacagggtagagtttgcacccggcataacgacat

SEQ ID NO: 31111 - DNA, 260 bp, Unknown
  Description of Unknown: RightRegion for integrase B5112 sequence
aaatcgggaattgccttctatctgatcggcggccttaaactgaccgaagccatagcatgaaaggacggtgaaaaagaatatgaaaaacagaaacatacccttcggatacagatacgaagatggaaagatcgtcgtcaatccagacgagcagaacacacttcaaagaatctgctccgaataccttgacggacgctcgcttctgcagatcgccaacggtctggaatcagacaaggtggagttcgcacccggcattatcacat

SEQ ID NO: 31112 - DNA, 260 bp, Unknown
  Description of Unknown: RightRegion for integrase B5113 sequence
aaatcggaaattgccttccatctgatcggcggccttaaactgaccgaaaccatagcatgaagggacggtgaaaaagaatatgaagaacaggaacatacccttcggatacagattcgaagatggaaagatcgtcgtcaatccagacgagcagaacacacttcaaagaatctgctccgaatacctcgacggacgctcgcttctgcagattgccaacggtctggaatcagacaaagtggagttcgcccctggtattatcacat

SEQ ID NO: 31113 - DNA, 260 bp, Unknown
  Description of Unknown: RightRegion for integrase B5114 sequence
cacatcggtctcaggcgaacaccatatatcatctttatggtctcgcttgcgacaaaataacgaaaaccgaggggatagcccctcggttttttgttactcattcacgcgctccgattagctgaatgattgtccccattgatcccgcctgataaatgcgaatttccttcgcgcgggcgctgaaagccatctcgttgtcgtcatatattttcagccagtgtgcgaaggtggcttcgagcttgtaatggctcgggatttcacac

SEQ ID NO: 31114 - DNA, 260 bp, Unknown
  Description of Unknown: RightRegion for integrase B5115 sequence
aagcgatatatcgcttactctgtttttttttgcaagcgtgctcaaaacggtgagcagtagctaccacatttgtgcgagttaagtaccttcggcacatttgaaaacattatatgaaaagtgtataatatctttgagtggattttgtaacgagaaacttgacagagaaatggggaaagaatataatgaactataagaaatgcaagcttgacttttagaaacttagttaattgaaaataaggctataaaaaacaaataaaatt

SEQ ID NO: 31115 - DNA, 260 bp, Unknown
  Description of Unknown: RightRegion for integrase B5116 sequence
gaaaacaattcagaattcattttagacgtctatatcaagagtgatggggcaatggtctgacccatatacatccgttaaaatatcagctgattttattacatccttggcaaattcggatgccagaaaataatcgatccgccatccagcgttattcttgcgagcgttaaaacgataactccaccacgagtattttatctcgtctgggtgtaaccatctataggtatcaataaaccctgactgcagcagttgttgaaattttt

SEQ ID NO: 31116 - DNA, 260 bp, Unknown
  Description of Unknown: RightRegion for integrase B5117 sequence
gaaagcagcgaggataccagtgttcttatagattccctcggggtgtacggaagagtttgaaacgaaagtttcagactctttttttgtggtgcacccggcatgggcaacaaagtggggttctttgtcaaatgtaggggtgagggctaacggttatttgccaaatgttggggtgggcggaagccttgtcctgaaaacggctgggtttctggatggaatgatccgtaaaagtatcggtttcgtattgacaagtgtgtttgttc

SEQ ID NO: 31117 - DNA, 260 bp, Unknown
  Description of Unknown: RightRegion for integrase B5118 sequence
aaggcagaccgcggcgaagggttcgtatgctgcgcgtcttgccctgttattaaaccttgaagcaagatagttgtttcaaggttttttttgtttaaaaatgaaaatagatgtattataatgggcataaagtatttattttaaatgatattaattttgtatttcaaaatggattacaaatgtaaggaggatttttaaatgaaggaaaagcttaagattaatgtgacgaagccacaatatgtgcaggtgtctgatattacata

SEQ ID NO: 31118 - DNA, 260 bp, Unknown
  Description of Unknown: RightRegion for integrase B5119 sequence
agtcgttggaataaggatgcacaagataaattcactcttgaattagagctattactttaacatacatcataaacaaacagaagaaatggcacacgtagaaataatagctacaatggctcatcaaattatggaaaatgcatcaatagaagaaattaaagctgctggaatggatggacattatgcggatcacggaaaagctactttctatactgatgctactggaaatccttggactgctacttatatccaagctaaaggtg

SEQ ID NO: 31119 - DNA, 109 bp, Unknown
  Description of Unknown: RightRegion for integrase B5120 sequence
gaaagcagcgaggataccagtgttcttatagattccctcggggtgtacggaagagtttgaaacgaaagtttcagactctatttttgtgcgcgtttggtatgaaaagcgg

SEQ ID NO: 31120 - DNA, 260 bp, Unknown
  Description of Unknown: RightRegion for integrase B5121 sequence
ctcgtcagctccaccaatttgccgcatcgttttgtacgatgcggcgttttttatgcctaaaaaactttggcagaccgtgccgggctccgaaccctgaagtcggatgcgaaccgggtggggtcatcaatgtactttttgaaaatccatcggttccacgcttctttctttgcattttgcagagttctgcgggcaagtgcatcgcttttatgcccccctctcggaaattccttcaaaaatttccgcaccatcgtaggttgaca

SEQ ID NO: 31121 - DNA, 260 bp, Unknown
  Description of Unknown: RightRegion for integrase B5122 sequence
gttgacaaggcagaccgcggcgaagggttcgtatgctgcgcgtcttgccctgctatttaaaggatttaagttgaatttcagcttgaatcctttttttgcatttaaaaagattaattataaagttgctaaaactatataataataatgatgaggagataatcatgaatgaatctaaatatgagcatatagtacacccatttccaccgttgtataacagtgaatcaagaatactgatacttggaagtctgccatcagttaag

SEQ ID NO: 31122 - DNA, 260 bp, Unknown
  Description of Unknown: RightRegion for integrase B5123 sequence
cacatcggtctcaggcgaacaccatatatcatctttatggtctcgcttgtgacaaaataacgaaaaccgagggttcagtccctcggttttttgtttaattgtatttttgcattaacattgccagagctgctttcgcttccggagttttggtagaaatatcagctgcgcgatcatagttgtataccgtctcttcgtcctgctcgagcgtgagtttcgatatcttaccgttctcaatgccccacgggctcggttcatcgtaa

SEQ ID NO: 31123 - DNA, 109 bp, Unknown
  Description of Unknown: RightRegion for integrase B5124 sequence
cccgaaagcgacctctcaataaccctgcacccggtcgtcacttattcaaaccctcactgataacatcaatgtacgggtgaacttgcacacatggagatgatttccagca

SEQ ID NO: 31124 - DNA, 260 bp, Unknown
  Description of Unknown: RightRegion for integrase B5125 sequence
ggaagatgggaaaaaggtaatattaacaaatttgtgttagaaatagtattgaaaatttaacttacatatgtgatgtcttaatgaacttggtcatgttgaaatgatttgtgctatgatatatcaactaaccgaaggtgttagtaaagaagaacttatgaaggcaggatttgatgctcattatgttgaacatggacttgatttgttccctacaaatgcgaatggaattaattttactactgattatatatctgctgttgggg

SEQ ID NO: 31125 - DNA, 260 bp, Unknown
  Description of Unknown: RightRegion for integrase B5126 sequence
aaggcagaccgcggcgaagggttcgtatgctgcgcgtcttgctctgttattaaaccttgaagcaagatagttgtttcaaggtttttttatgtttaaaaatgaaaatagatgtattataatgggcataaagtatttattttaaatgatattaattttgtatttcaaaatggattacaaatgtaaggaggatttttaaatgaaggaaaagcttaagattaatgtgacgaagccacagtatgtgcaggtatctgatattacat

SEQ ID NO: 31126 - DNA, 260 bp, Unknown
  Description of Unknown: RightRegion for integrase B5127 sequence
aaggcagaccacggcgaagggttcgtatgctgcgcgtcttgccctgttcttaaaccttgaagcaagatagttgtttcaaggttttttatgtttaaaaatgaaaatagatgtattataatgggcataaagtatttattttaaatgatattaattttgtatttcaaaatggattacaaatgtaaggaggatttttaaatgaaggaaaagcttaagattaatgtgacgaagccacaatatgtgcaggtatctgatattacata

SEQ ID NO: 31127 - DNA, 260 bp, Unknown
  Description of Unknown: RightRegion for integrase B5128 sequence
ccaaatgtgaatcaggcgaaccccccacgatctacttcgtgggtgcgttcttcgtcctgaccatgccgctccctgagcggtaaaaaataggcactcggccttgatagccgggtgcctatttctttttgccctgctgacaatataaacaacatagtgcggtcaataattgtgcagtatacaccttgataaccatgcgtatgtatggtaatatacagacacaataaaggacgggggtaaatcaaaaatgaccgctaaatact

SEQ ID NO: 31128 - DNA, 260 bp, Unknown
  Description of Unknown: RightRegion for integrase B5129 sequence
aaaaaggggcaggatcgttctgattttgaaattgatgtgttcccaaaagtgccgaaatagcggcgtttttcgttcgttgcatcttctacgagcgaaagaactcgctcacatggaaatggtatgcgccatcgtttatcagctcaccaaggacctttctccggaggaaatcgaacgctccggatttgctccttattatgtagatcacacacttgctctctggccacaggcagcaagcggcgccccatggacagcaacttatt

SEQ ID NO: 31129 - DNA, 260 bp, Unknown
  Description of Unknown: RightRegion for integrase B5130 sequence
aaaaagaaccagaaaaactctgaatttatgattgatgtgtacccgaaagtaccgaaataatggtgctttcggattctattcattagttgcatcttctacgagcgtattcctccgtgccgatatccgtaagtgttgcggtcacctctttatatggcatggtataccgctgagataaataccgcattgatgcagcgagctccccgtccggtccaccaaataacaataacctataatatttctacatattataaatatacacg

SEQ ID NO: 31130 - DNA, 260 bp, Unknown
  Description of Unknown: RightRegion for integrase B5131 sequence
gaagtgttcggacgctgtgcgcaaagtcctgccaaaagccgcttatctcgtttgaggtaagcggctttttgtttttgctgcgtcttaggggctgcatatatgcggtccgcgggttggcgggagcgacccgaccacggctggcatctaggattctaaacaggcgtttacttacgatgcgccgaaaaaagaggatgtggactgatccacatcctctaaaacaaaaacaaatccgaaacaatgcttcacaaaaaagattgagt

SEQ ID NO: 31131 - DNA, 260 bp, Unknown
  Description of Unknown: RightRegion for integrase B5132 sequence
aagaagaatcagaaaaactccgaattcactattgacgtttacccgaaagtaccgaaataatggtgctttcggattctattcattagttgcatcttctacgagcgtattctttcgcacatctaagatgcaactaatacacattaaataagtagtaactttttgataaaaataagattgatacaatattcacccctcagagagctaatcttcgaggggatttttattagaataactggaaccgatcaattgcctgtccgaac

SEQ ID NO: 31132 - DNA, 260 bp, Unknown
  Description of Unknown: RightRegion for integrase B5133 sequence
aaaaaggggcaggatcgttctgattttgaaattgatgtgtttccaaaagtgccgaaatagcggcgtttttcattcgttgcatcttctacgagcgaaagaactcgctcacatggaaatggtatgcgccatcgtttatcagctcaccaaggacctttctccggaggaaatcgaacgctccggatttgctccttattatgtagatcacacacttgctctctggccacaggcagcaagcggcgccccatggacagcaacttatt

SEQ ID NO: 31133 - DNA, 260 bp, Unknown
  Description of Unknown: RightRegion for integrase B5134 sequence
gaaataatagtaaatgataaagatgtaatcgtttatttaaacatccctattgtgaattgaactgtaaagaatgtgtatgtcaaaaagtaatcacgtcatctgcaccaaaatttataaaccgtataaatgcttgaatgtcaagtgtttatgcggttttttagtacttacgagaagaaaatcaacgtgataaaaagtgataaaatgtgattgatgtcactttgctatcaaaaaaaaacaatgaaattttatcgtcagacatt

SEQ ID NO: 31134 - DNA, 260 bp, Unknown
  Description of Unknown: RightRegion for integrase B5135 sequence
aaaaagaaccagaaaaactctgaatttatgattgatgtgtacccgaaagtaccgaaataatggtgctttcggattctattcattagttgcatcttctacgagcgtattcctccgtgccgatatccgtaagtgttgcggtcacctctttatatggcatggtataccgctgagataaataccgcattgatgcagcgagctccccgtccggtccaccaaataacaacaacctataatatttctacatattataaatatacacg

SEQ ID NO: 31135 - DNA, 260 bp, Unknown
  Description of Unknown: RightRegion for integrase B5136 sequence
aagaaaaaccagaaaaactctgaattcacaatcgatgtgtacccgaaagtgccgaaataacggtgctttcggagtatatttattagctgcatcttttacgagcgtattcctccgtgccgatatccgtaagtgttgctgtcacctctttatatggcatggtgtaccgctgagataaataccgcatcgatgcagcgagctccccgtccgggccaccaaataacaataacctataatatttctacatattataaatatacacg

SEQ ID NO: 31136 - DNA, 260 bp, Unknown
  Description of Unknown: RightRegion for integrase B5137 sequence
tggtccgccgagaacgacctctccgtcaccatccaccccaaaatttccgcccgcaaataacacctaacattgcaatccgcgtgaagcggaactgctctgtgtttccattgatgttgagcggattcagtttaatcgaggtttctacagcgttgatatccgctttttctatcgcattgaatgtgaaatcagctgcgtaatcggtcgtccgcgtattgtggacggactggcggtatttgacaaacgtgttgtactgttcggcg

SEQ ID NO: 31137 - DNA, 260 bp, Unknown
  Description of Unknown: RightRegion for integrase B5138 sequence
ccagacgaatctgaaagcggttcttgtagtatcgagtttggctcccccgactggacttgaaccagtgacaccctgattaacagtttgggtgttgaaaacgcactatacacattatacaaggttgatgagcatttgtcaatactgcttaccagaaaaggcagcaggaaccgtcaaattacgctttttatctcccaaaggtgtataataagtattgcgaaacagatttgttttgtaaatacaacatatgggagcaaaacatg

SEQ ID NO: 31138 - DNA, 260 bp, Unknown
  Description of Unknown: RightRegion for integrase B5139 sequence
aagaaaaaccagaaaaactctgaattcacaatcgatgtgtacccgaaagtgccgaaatgacggtgctttcggagcatatttattagttgcatcttctacgagcgtattcctccgtgccgatatccgtaagtgttgcggtcacctctttatatggcatggtgtaccgctgagataaataccgcatcgatgcagcgagctccccgtccgggccgccaaattgtgaaatgatcactttggcaatctgtgggttcgtttgtgta

SEQ ID NO: 31139 - DNA, 109 bp, Unknown
  Description of Unknown: RightRegion for integrase B5140 sequence
aagaaaaaccagaaaaactctgaattcacaatcgatgtgtacccgaaagtgccgaaataacggtgctttcggagtatattcattagctgcatcttttacgagcgtattc

SEQ ID NO: 31140 - DNA, 260 bp, Unknown
  Description of Unknown: RightRegion for integrase B5141 sequence
gaagtgttcggacgctgtgcgcaaagtcctgccaaaagccgtttatctcgtttgaggtaagcggctttttgttttttgctgcgtcgtaggggccgcatatatgcggcccgcgggttggcgggagcgacccgatcacggctggcatctggaatgctaaacaggcgcttacttacgatgtgccgaaaaaaagaggatgtggactgatccacatcctctaaaacaaaaacaaatccgaaacaacgcttcacaaagaagattga

SEQ ID NO: 31141 - DNA, 260 bp, Unknown
  Description of Unknown: RightRegion for integrase B5142 sequence
gaaataatagtaaatgaagaagatgtaatcgtttatttaaacatccctattacaaagtgaaatagcatataattcgtgtatgtcaaaaagtgatcacctcatctgcaccatagtgacatgcacagttaagagatagatttattctatctcttgtgtgtcatagttttatcaaagcaattcatatagatttgaatatcgctttcatttaccactattttttttactacaagatttatcaattcttttaatggagttgattc

SEQ ID NO: 31142 - DNA, 260 bp, Unknown
  Description of Unknown: RightRegion for integrase B5143 sequence
aagaaaaaccagaaaaactctgaattcacaatcgatgtgtacccgaaagtgccgaaataacggtgctttcggagtatatttattagctgcatcttttacgagcgtattcctccgtgcctgtatcgttatcgaaattgcacattttaaattgtcagaactttaatagcacaccacaacgtacatttttgtcaatccctttactgtaagcacttgaaaagtggggattgacaaaagaaaacacagtaaaatgagaaaaggga

SEQ ID NO: 31143 - DNA, 260 bp, Unknown
  Description of Unknown: RightRegion for integrase B5144 sequence
aaaaaggggcaggatcgttctgattttgaaattgatgtgtttccaaaagtgccgaaatagcggcgtttttcattcgttgcatcttctacgagcgaaagaactcgctcacatggaaatggtatgcgccatcgtttatcagctcaccaaggacctttctccggaggaaatcgaacgctccggatttgctccttattatgtagatcacacacttgccctctggccacaggcagcaagcggcgccccatggacagcaacttatt

SEQ ID NO: 31144 - DNA, 260 bp, Unknown
  Description of Unknown: RightRegion for integrase B5145 sequence
tggtccgccgagaacgacctctccgtcaccatccaccccaaaatttccgcccgcaaataacacccaacatcgcaagccgcgtgaagcggaactgctctgtgtttctattgatgttgagcggattcagtttaatcgaggtttctacagcgttgatatccgctttttctatcgcattgaatgtgaaatcagctgcgtaatcggtcgtccgcgtatcgtggacggactggcggtatttgacaaacgtgttgtactgttcggcg

SEQ ID NO: 31145 - DNA, 109 bp, Unknown
  Description of Unknown: RightRegion for integrase B5146 sequence
ttcgataaaatcacctgggacagtgcctcaaaggaactgcttttctttttacagatgtgatgttaattaatctggtcagtacctcctgaccacccccactcgtaagtca

SEQ ID NO: 31146 - DNA, 260 bp, Unknown
  Description of Unknown: RightRegion for integrase B5147 sequence
tatcacagcgtcaggatactgccactcaaaggcggctttggtgtgctgctcgcggcctaatagttgctgccaggcgtgctcgcggcgccgtcatcagggtagcggaaagaattttgcccaaaaaaaatgcccaccccggtagagccggagtgggcgaagcgctatttgcgattgatgaagaggcacatggcgagcacgccgacagctgcccccagctgtgcgcctaaaagtaccatgaggatgttgcctaacatataagc

SEQ ID NO: 31147 - DNA, 260 bp, Unknown
  Description of Unknown: RightRegion for integrase B5148 sequence
aagaaaaaccagaaaaactctgaattcacaatcgatgtgtacccgaaagtgccgaaatgacggtgctttcggagcatatttattagttgcatcttctacgagcgtattctttcgcacatccaagatgcaactaatccacattaaataagtaatacctttttgataaaaataagattgatacaatattcacccctcagagagctaatctccgagggggttttattaaatagatttaaccggttcacgatacaatgggttca

SEQ ID NO: 31148 - DNA, 109 bp, Unknown
  Description of Unknown: RightRegion for integrase B5149 sequence
gcctgttcggatttatcatcaaatgccctgccactgaggttttcaagattttggtcttgaaaacctcttttttactgtcaaatacttcaaataatgcactttctggtat

SEQ ID NO: 31149 - DNA, 109 bp, Unknown
  Description of Unknown: RightRegion for integrase B5150 sequence
aagaaaaaccagaaaaactctgaattcacaatcgatgtgtacccgaaagtgccgaaataacggtgctttcggagtatatttattagctgcatcttttacgagcgtattc

SEQ ID NO: 31150 - DNA, 260 bp, Unknown
  Description of Unknown: RightRegion for integrase B5151 sequence
cccttgctattgctctatgttcctctccccgcgggcatatttcgccatagaggtgcctagcgttcattctaaggcgttttcgagtgttcgccctcaaaactataccctaaaatttaaaccgcgtcagaatcgattctaggggcattctgagcgatttgctctgtattgtgaatattgtacaaatcataagcttgtattttgtgcatgtatacaaaagtgttcccattgtcataaaacgcttgacaaatgttcccgaatgg

SEQ ID NO: 31151 - DNA, 241 bp, Unknown
  Description of Unknown: RightRegion for integrase B5152 sequence
gatatacattggagcttttccccggaagccgccgaggttatcccggggcgctccgcataaaaaataaaggccgtccgtgctgggcggccttttcgcttaaattgctgaatcgctgaatttacgcgcacttttcgctgacttttcgcaaaatgcgcgaataacgcgattttgttggcgccgacaaaatcggcaggttatttgtctactctgatataactactgcaaacctccacatgcttcg

SEQ ID NO: 31152 - DNA, 260 bp, Unknown
  Description of Unknown: RightRegion for integrase B5153 sequence
aaaaaggggcaggatcgttctgattttgaaattgatgtgtttccaaaagtgccgaaatagcggcgtttttcattcgttgcatcttctacgagcgaaagaactcgctcgtagaagatgaagctaattaaataatgataagatgatgcaatatttctccccggagctgatactccggggaatatttttaatataactggaatttatcaagcgcaatgccgaaacatccggcatatccgtcctgcccgtttcctacttcattg

SEQ ID NO: 31153 - DNA, 260 bp, Unknown
  Description of Unknown: RightRegion for integrase B5154 sequence
gcagaggaattggctgttagcagtgttcgattaagctccgcaagcagccaccaagcataataaaaggatagctgatggctatccttttgtgtttctggtaaagagcagaggggatttgaagggaacggcccggcagggtaaaaaggcatccggtggatggctttttagttccccgggctggcggcaagactgccccagtcttgccgggaatcccctatgctccactattaaaaaacgcctgaatctataaggattcgggc

SEQ ID NO: 31154 - DNA, 260 bp, Unknown; identical to SEQ ID NO: 31132
  Description of Unknown: RightRegion for integrase B5155 sequence

SEQ ID NO: 31155 - DNA, 260 bp, Unknown
  Description of Unknown: RightRegion for integrase B5156 sequence
gaagccctctccgatgcagaggataggtgttcgactttccaacgatacccgcagtcctgacaaaccgcatagctttttacctttgatcctttacgtatcagcaacggaatcagaattatcaatccacaagttaagagagtaagtattatccacagtatagacgcgaggcatcctcttttcttctgctccgctaccgcttgcaccgtaacattttcgctgccgcatttcttacataccattgtcatttcctcccgttttcc

SEQ ID NO: 31156 - DNA, 109 bp, Unknown; identical to SEQ ID NO: 31149
  Description of Unknown: RightRegion for integrase B5157 sequence

SEQ ID NO: 31157 - DNA, 260 bp, Unknown
  Description of Unknown: RightRegion for integrase B5158 sequence
aaaaaggagcaggatcgttctgattttgaaattgatgtgtttccaaaagtgccgaaatagcggcgtttttcattcgttgcatcttctacgagcgaaagaactcgctcacatggaaatggtatgcgccatcgtttatcagctcaccaaggacctttctccggaggaaatcgaacgctccggatttgctccttattatgtagatcacacacttgctctctggccacaggcagcaagcggcgccccatggacagcaacttatt

SEQ ID NO: 31158 - DNA, 260 bp, Unknown
  Description of Unknown: RightRegion for integrase B5159 sequence
cactgtgtgtatgataaggttaatgataacttggagatatatttttttctgcaaagataactaaaaggtgaggttattttattcctcaccttcttgattacttttttctattatatcccatgtcttaatagcctctttaataaattgataaaaatacattaatacaacaattcctaacaatacaacacttattattaatgtaacaatattactatgattttccttaaaaactgctattaagtctgttatttgattaactg

SEQ ID NO: 31159 - DNA, 260 bp, Unknown
  Description of Unknown: RightRegion for integrase B5160 sequence
aaaaagaaccagaaaaactctgaatttatgattgatgtgtacccgaaagtaccgaaataatggtgctttcggattctattcattagttgcatcttctacgagcgtattcctccgtgccgatatccgtaagtgttgctgtcacctctttatatggcatggtgtaccgctgagataaataccgcattgatgcagcgagctccccgtccgggccaccaaattgtgaaatgatcactttggcaatctgtgggttcgtttgtgta

SEQ ID NO: 31160 - DNA, 260 bp, Unknown; identical to SEQ ID NO: 31128
  Description of Unknown: RightRegion for integrase B5161 sequence

SEQ ID NO: 31161 - DNA, 109 bp, Unknown
  Description of Unknown: RightRegion for integrase B5162 sequence
gaagtgttcggacgctgtgcgcaaagtcctgccaaaagccgcttatctcgtttgaggtaagcggctttttttgcgttgtaggggccgggcatgttcggcccgcgggttg

SEQ ID NO: 31162 - DNA, 260 bp, Unknown; identical to SEQ ID NO: 31132
  Description of Unknown: RightRegion for integrase B5163 sequence

SEQ ID NO: 31163 - DNA, 260 bp, Unknown
  Description of Unknown: RightRegion for integrase B5164 sequence
aatgttgctttcttatctatttcactcataagtcctaatttatcctctcaatcggcttagaagtgccttcagtagtggctttaagctcttctgcctttacggcattgactttgacgtcagcgccttttaatttggcaatctgagcctcaagcttctttacctcagcgtcctgctttgccttaagctcttcctgctttttggcaagtttgtcagctctaagcttagatttgatagcttctttttctgcttttgccttatca

SEQ ID NO: 31164 - DNA, 260 bp, Unknown
  Description of Unknown: RightRegion for integrase B5165 sequence
ggacgttggaataaggaagcacaagataatttttctattgaattagaactgaatctttaacatacatcataaatgttctaaagaaatggctcatgtagagatgatagctactatggctaatcaactaatggaaaatgcttctatagatgaaattaaagctgcaggcttagatgggcactatgttgaccatggaaaagctttattctatacagatgctacaggcaacccttggactgcaacttatatacaagctaaaggtg

SEQ ID NO: 31165 - DNA, 260 bp, Unknown
  Description of Unknown: RightRegion for integrase B5166 sequence
cacatcagcgctacgcgaacactatatcttgtttatagcgttccgtttaccgcaaaataagaaaaaccgaggctaaagcctcggttttttgtttatttcagcgcattctccgcgccgacgggattgctcttcatccactcattcattctcgccacaacctcatcaatgagccgtgacaacgactcctcggagatcagccacgtcagccacttgtatctggcgtacagccacgcgatgacctgctgcttcttgagctgtcc

SEQ ID NO: 31166 - DNA, 260 bp, Unknown
  Description of Unknown: RightRegion for integrase B5167 sequence
gatgtgttcggacgctgtgcgcaaagtcctgccaaaagccgcttatctcgtttgaggtaagcggctttttgtttttttgcgttgtaggggccgggcatgcccggcccgcgggttggcgggagagacccgaccacggctggcatctaggattctaaacaggcgtttacttacaatgcgccgaaaaaagaggatgtggactgatccacatcctctgaaacaaaaacaaatccgaaacaatgcttcacaaagaagattgagtt

SEQ ID NO: 31167 - DNA, 260 bp, Unknown
  Description of Unknown: RightRegion for integrase B5168 sequence
tggtccgccgagaacgacctctccgtcaccatccaccccaaaatctccgcccgcaaataacacccaacatcgcaagtcgcgtgaacccgcctttccatcttctgtgtaacaaaaaaggccgcctcccggcggcctttccctcacttccccagttttcctgcaatctttccgatctcctccagtgcaaaccgtaactgttcattctcctcctgcacctccgcaggcagcagcggcacctctgccgcagcaggcagcgccat

SEQ ID NO: 31168 - DNA, 260 bp, Unknown
  Description of Unknown: RightRegion for integrase B5169 sequence
aagaaaaaccagaaaaactctgaattcacaatcgatgtgtacccgaaagtgccgaaatgacggtgctttcggagcatatttattagttgcatcttctacgagcgtattcctccgtgccgatatccgtaagtgttgctgtcacctctttatatggcatggtgtaccgctgagataaataccgcatcgatgcagcgagctccccgtccgggccaccaaatagcaataacctataatatttttacatattataaatatacacg

SEQ ID NO: 31169 - DNA, 260 bp, Unknown; identical to SEQ ID NO: 31132
  Description of Unknown: RightRegion for integrase B5170 sequence

SEQ ID NO: 31170 - DNA, 260 bp, Unknown
  Description of Unknown: RightRegion for integrase B5171 sequence
gcagaggaattggctgttagcagtgttcgattaagctccgcaagcagccaccaagcataataaaaggatagctgatggctatccttttgtgtttctggtaaagagcagagggaatttgaagggaacggcccggcagggtaaaaaggcatccggtggatggctttttagttccccgggctggcggcaagactgccccagtcttgccgggaatcccctatgctccaccaagcataatacaaggatagctgatcttaatggtt

SEQ ID NO: 31171 - DNA, 260 bp, Unknown
  Description of Unknown: RightRegion for integrase B5172 sequence
aagaaaaaccagaaaaactctgaattcacaatcgatgtgtacccgaaagtgccgaaataacggtgctttcggagtatatttattagctgcatcttttacgagcgtattcctccgtgccgatatccgtaagtgttgcggtcacctctttatatggcatggtataccgctgagataaataccgcattgatgcagcgagctccccgtccggtccaccaaattgtgaaatgatcactttggcaatctgtgggttcgtttgtgta

SEQ ID NO: 31172 - DNA, 260 bp, Unknown
  Description of Unknown: RightRegion for integrase B5173 sequence
tgtattgatttgggaagaaataaaggggggaaaccaatattagatatttttttaaaataaatctacatcatgatggtgatgtcaatgtagcccatcaagaaattgatttaaagaatcctaaaacgaatcgtaaaaatgcaggtttttctgatgaagagagagctaagatgacaaatttattagaaaatggttttatagatacgtatcgatatttatatcctgatcaagaaggtgtttattcttggtggtcatatcgattt

SEQ ID NO: 31173 - DNA, 260 bp, Unknown
  Description of Unknown: RightRegion for integrase B5174 sequence
ggacgttggaataaagaagcacaagataatttttctattgaattagaactgaatctttaacatacatcataaatgttctaaagaaatggctcatgtagagatgatagctactatggctaatcaactaatggaaaatgcttctatagatgaaattaaagctgcaggcttagatgggcactatgttgaccatggaaaagctttattctatacagatgctacaggcaacccttggactgcaacttatatacaagctaaaggtg

SEQ ID NO: 31174 - DNA, 260 bp, Unknown
  Description of Unknown: RightRegion for integrase B5175 sequence
ggcgaacccttttcggggttcgcctttttttgtttgggttggaagtcatcgccccagtagtcgaaagcgaaataaagcttgagttcatccccgtctacttcaatgagccgcacgaacgtctcgatgatttcggctgcatctggttcctgcgcaatgtgatcgagccaagcggctatggcttcaccagacagattcgccccttcgttggcttgagcttgccgcaaatcggcttctaatgccgctttctgctcacggagcat

SEQ ID NO: 31175 - DNA, 260 bp, Unknown
  Description of Unknown: RightRegion for integrase B5176 sequence
gaagtgttcggacgctgtgcgcaaagtcctgccaaaagccgcttatctcgtttgaggtaagcggctttttgtttttgctgcgttgtaggggccgcatatatacggcccgcgggttggcgggagagacccgaccacggctggcatctggaatgctaaacaggcgcttacttacgatgtgccgaaaaaagaggatgtggactgatccacatcctctgaaacaaaaacaaatccgaaacaatacttcacaaagaagattgagt

SEQ ID NO: 31176 - DNA, 260 bp, Unknown
  Description of Unknown: RightRegion for integrase B5177 sequence
gaagtgttcggacgctgtgcgcaaagtcctgccaaaagccgcttatctcgtttgaggtaagcggccttttgttttttgctgcgtcgcaggggccgcatatatgcggcccgcgggttggcgggagcgacccgaccacggctggcatctggaatgctaaacaggcgtttacttacgatgcgccgaaaaaagaggatgtggactgatccacatcctctaaaacaaaaacaaatccgaaacaatgcttcacaaagaagattgag

SEQ ID NO: 31177 - DNA, 260 bp, Unknown
  Description of Unknown: RightRegion for integrase B5178 sequence
gcagaggaattggctgttagcagtgttcgattaagctccgcaagcagccaccatacttgagaaatccgaacttgattccgatagggaatgggttcggatttcttgtttttatcaaggacattgaagtttagtttcgggatagaataacatcaaattcaggaggatatacccatggaaaagctcataagctgtgcgttcaatatagataccgcctgcgtggaacttcactttacggatgggagtatttactccataaattg

SEQ ID NO: 31178 - DNA, 260 bp, Unknown
  Description of Unknown: RightRegion for integrase B5179 sequence
gaagtgttcggacgctgtgcgcaaagtcctgccaaaagccgcttatctcgtttgaggtaagcggctttttgtttttttgcgttgtaggggccgggcatgcccggcccgcgggttggcgggagagacccgaccacggctggcatctaggattctaaacaggcgtttacttacaatgcgccgaaaaaagaggatgtggactgatccacatcctctgaaacaaaaacaaatccgaaacaatgcttcacaaagaagattgagtt

SEQ ID NO: 31179 - DNA, 260 bp, Unknown
  Description of Unknown: RightRegion for integrase B5180 sequence
gatatacattggagctttgtcccggaagccgccgaggttatcccggggcgctccgcataaaaataaggccgcccgtactgggcggcctttgtgcttagattgcgaaatcgctgaatttacgcgcacttttcgctgacttttcgcaaaatgcgcgaataacgcgattttgttggcgccgacaaaatcggcaggttatttgtctactctgatataactactgcaaacctccacatgcctcgtcctcgggaaaaggtccaccg

SEQ ID NO: 31180 - DNA, 260 bp, Unknown
  Description of Unknown: RightRegion for integrase B5181 sequence
taccgcaacgaaaacccctcgaagtacctgtccattacggtatatccaattcttgattgattttatttttaggtaaaataaggatatgatgcgtgtcttgattcatcaagacacgcatcatatccttattattttgctacttccagccatcgatcatcgccttgacttcagcggtcttggcgatgaggtcgttgtggatggcttcccacgcggtgatcatgccgtcgacgtaggcggggttgcgcttgtactcctcggat

SEQ ID NO: 31181 - DNA, 260 bp, Unknown
  Description of Unknown: RightRegion for integrase B5182 sequence
gatgtgttcggacgctgtgcgcaaagtcctgccaaaagccgcttatctcgtttgaggtaagcggctttttgttttttgctgcgtcgtaggggccgcatatatgcggcccgcgggttggcgggagagacccgaccacggctggcatctggaatgctaaacaggcgtttacttacgatgcaccgaaaaaagaggatgtggacagatccacatcctctaaaacaaaaacaaatccgaaacaatacttcacaaagaagattgag

SEQ ID NO: 31182 - DNA, 260 bp, Unknown
  Description of Unknown: RightRegion for integrase B5183 sequence
gcagaggaattggctgttagcagtgttcgattaagctccgcaagcagccaccaagcataataaaaggatagctgatggctatccttttgtgtttctggtaaagagcagaggggatttgaagggaacggcccggcagggtaaaaaggcatccggtggatggctttttagttccccgggctggcggcaagactgccccagtcttgccgggaatcccctatgctccaccaagcataataaaaggatagctgatcttaatggtt

SEQ ID NO: 31183 - DNA, 260 bp, Unknown
  Description of Unknown: RightRegion for integrase B5184 sequence
gaagtgttcggacgctgtgcgcaaagtcctgccaaaagctgcttatctcgtttgaggtaagcggctttttattttttgctgcatcgtagggctcgggcatgcccggcccgcgggttggcgggaacgacccgaccacggctggcatctggaatgctaaacaggcgcttacttacgatgcgccgaaaaaagaggatgtggactgatccacatcctctaaaacaaaaacaaatccgaaacaatgcttcacaaagaagattgag

SEQ ID NO: 31184 - DNA, 260 bp, Unknown
  Description of Unknown: RightRegion for integrase B5185 sequence
taccgcaacgaaaacccctcgaagtacctgtccattacggtatatccaattcttgattgattttatttttagataaaataaggatatgatgcgtgtcttgatgaatcaagacacgcatcatatccttattattttgctacttccagccatcgatcatcgccttgacctctgcggtcttggcgatgaggtcgttgtggatggcttcccacgcgacgatcatgccgtcggcgtaagatgggttgcgcttgtactcctcggag

SEQ ID NO: 31185 - DNA, 109 bp, Unknown
  Description of Unknown: RightRegion for integrase B5186 sequence
aagaaaaaccagaaaaactctgaattcacaatcgatgtgtacccgaaagtgccgaaatgacggtgctttcggagcatatttattagttgcatcttctacgagcgtattc

SEQ ID NO: 31186 - DNA, 90 bp, Unknown
  Description of Unknown: RightRegion for integrase B5187 sequence
tcgacctttaacaccttaactccaccaaataagttaaaggggactttgtcaataatttgatataaaaaaagtaaaaaagagggggatatt

SEQ ID NO: 31187 - DNA, 260 bp, Unknown
  Description of Unknown: RightRegion for integrase B5188 sequence
gatgtgttcggacgctgtgcgcaaagtcctgccaaaagccgcttatctcgtttgaggtaagcggctttttgttttttgctgcgtcgtagggggccgcatatatacggcccgcgggttggcgggagcgacccgaccacggctggcatctggaatgctaaacaggcgtttacttacgatgcgccgaaaaaaagatgtggactgatccacatcctctaaaacaaaaacaaatccgaaacaatgcttcacgaagaagattgagt

SEQ ID NO: 31188 - DNA, 109 bp, Unknown
  Description of Unknown: RightRegion for integrase B5189 sequence
gagttcagcagagaatgtaattccgagttcatcctggatgtattcctgaaagaagattagaggtctatatccaactctaccgggcaatgatcggaacccatgattcctg

SEQ ID NO: 31189 - DNA, 260 bp, Unknown; identical to SEQ ID NO: 31152
  Description of Unknown: RightRegion for integrase B5190 sequence

SEQ ID NO: 31190 - DNA, 260 bp, Unknown
  Description of Unknown: RightRegion for integrase B5191 sequence
gaagtgttcggacgctgtgcgcaaagtcctgccaaaagccgcttatctcgtttgaggtaagcggctttttgttttttgctgcgtcgtaggggccgggcatgtgcggcccgcgggttggcgggagagacccgaccacggctggcatccggaatgctaaacaggcgcttacttacgatgtgccgaaaaaagaggatgtggactgatccacatcctctaaaacaaaaacaaatccgaaacaatgcttcacaaagaagattgag

SEQ ID NO: 31191 - DNA, 260 bp, Unknown
  Description of Unknown: RightRegion for integrase B5192 sequence
aagaaaaaccagaaaaactctgaattcacaatcgatgtgtacccgaaagtgccgaaataacggtgctttcggagtatatttattagctgcatcttttacgagcgtattcctccgtgccgatatccgtaagtgttgcggtcacctctttatatggcatggtgtaccgctgagataaataccgcatcgatgcagcgagctccccgtccgggccaccaaattgtgaaatgatcactttggcaatctgtgggttcgtttgtgta

SEQ ID NO: 31192 - DNA, 84 bp, Unknown
  Description of Unknown: RightRegion for integrase B5193 sequence
tggtccgacgagaatgacctctccgtcaccatccaccccaaaatttccgcccgcaaataacacctaacatcgcaatccgcgtga

SEQ ID NO: 31193 - DNA, 260 bp, Unknown
  Description of Unknown: RightRegion for integrase B5194 sequence
aaaaaggggcaggatcgttctgactttgaaattgatgtgtttccaaaagtgccgaaatagcggcgtttttcgttcgttgcatcttctacgagcgaaagaactcgcccatagaagatgaagctaattaaataatgataagatgatgcaatatttcaccccggagctgatcctccggggaatgtttttagtatagttgaaatttgtcaaacgcaacgccgaaacatccggcatgtccgtcctgcccgtttcctacttcattg

SEQ ID NO: 31194 - DNA, 109 bp, Unknown
  Description of Unknown: RightRegion for integrase B5195 sequence
aagaaaaaccagaaaaactctgaatttacaatcgatgtgtacccgaaagtgccgaaataacggtgctttcggagtatattcattagctgcatcttttacgagcatattc

SEQ ID NO: 31195 - DNA, 109 bp, Unknown
  Description of Unknown: RightRegion for integrase B5196 sequence
aaaaagaaccagaaaaactctgaatttatgattgatgtgtacccgaaagtaccgaaataatggtgctttcggattctattcattagttgcatcttctacgagcgtattc

SEQ ID NO: 31196 - DNA, 260 bp, Unknown
  Description of Unknown: RightRegion for integrase B5197 sequence
gagttcagcagagaatgtaattccgagttcatcctggatgtattcctgaaagaagattagaggtctatatccagttctaccgggcaatgatcggaacccatgattcctgtatggattctggcatcctggatcttgtcctgcacaaaatcggaagtcaggaaatagtctattctccatccagcatttcgttccctggctttaaagcgatatgaccaccaggagtattctatctgatctggatacagatagcgatatgtgtc

SEQ ID NO: 31197 - DNA, 260 bp, Unknown
  Description of Unknown: RightRegion for integrase B5198 sequence
aagaaaaaccagaaaaactctgaattcacaatcgacgtgtacccgaaagtgccgaaatgacggtgctttcggagcatatttattagttgcatcttctacgagcgtattcctccgtgccgatatccgtaagtgttgcggtcacctctttatatggcatggtataccgctgagataaataccgcattgatgcagcgagctccccgtccggtccaccaaattgtgaaatgatcactttggcaatctgtgggttcgtttgtgta

SEQ ID NO: 31198 - DNA, 260 bp, Unknown
  Description of Unknown: RightRegion for integrase B5199 sequence
gatgtgttcggacgctgtgcgcaaagtcctgccaaaagccgcttatctcatttgaggtaagcggctttttgttttttgctgcgtcgtaggggccgcatatatgcggccagcaggtttgcggcagtaacccgttgacgtgtgattgctttcgcgctgcgggccggcatgtgcggccccctgttgatgcgttgactatatataaccaacaaaaaagccgaatccgtgaggactcggcttttgctgtttctgacagccatctt

SEQ ID NO: 31199 - DNA, 260 bp, Unknown
  Description of Unknown: RightRegion for integrase B5200 sequence
aagaaaaaccagaaaaactctgaattcacaatcgatgtgtacccgaaagtgccgaaataacggtgctttcagagtatattcattagctgcatcttttacgagcgtattcctccgtgccgatatccgtaagtgttgctgtcacctctttatatggcatggtgtaccgctgagataaataccgcatcgatgcagcgagctccccgtccgggccgccaaattgtgaaatgatcactttggcaatctgtgggttcgtttgtgta

SEQ ID NO: 31200 - DNA, 260 bp, Unknown
  Description of Unknown: RightRegion for integrase B5201 sequence
gaacatttagcatttgttaaaaataaattagttctatttttctatatacctaaattttaaaattaaagcagctatccatgatagttgctttttttgttttttattgcttaataaaatttttatttaccataaaattactagctaaaaataagcaaagctcctctaaagcttaaaaattaaacctttttttagtctccaaaaaattctatcatcgttagtaaaaaaatttaaaattcttgtatattaatacttttaatagt

SEQ ID NO: 31201 - DNA, 260 bp, Unknown
  Description of Unknown: RightRegion for integrase B5202 sequence
acttccaatgcaccagcattagcgatccgaccacgtagcatcaaaacagccagctcctgatccgcttccagtgtcgtcaactgtatactgtcctctttgatgcggcatctgtctaatttcagtaaagtcacatcccggtaaataccggcaccgaaattttcccagtaagtgctgctttttacgtttacctgtttttattcaaacattaatcactttttattatttctataaagatccgtgacatctttatattatttttc

SEQ ID NO: 31202 - DNA, 260 bp, Unknown
  Description of Unknown: RightRegion for integrase B5203 sequence
gagttcagcagagaatgtaattccgagttcatcctggatgtattcctgaaagaagattagaggtctatatccaactctaccgggcaatgatcggaacccatgattcctgtatggattctggcattctggatcttgtcctgtgcaaaatcagaagtcaggaaatagtctattctccatccggcatttcgttcccttgctttaaagcgatacgaccaccaggagtattcaatttgatctggatgcagatagcgatatgtgtc

SEQ ID NO: 31203 - DNA, 260 bp, Unknown
  Description of Unknown: RightRegion for integrase B5204 sequence
aagaaaaaccagaaaaactctgaatttacaatcgatgtgtacccgaaagtgccgaaataacggtgctttcggagtatattcattagctgcatcttttacgagcatattcctccgtgccgatatccgtaagtgttgcggtcacctctttatatggcatggtataccgctgagataaataccgcattgatgcagcgagctccccgtccggtccaccaaattgtgaaatgatcactttggcaatctgtgggttcgtttgtgta

SEQ ID NO: 31204 - DNA, 260 bp, Unknown
  Description of Unknown: RightRegion for integrase B5205 sequence
gaagtgttcggacgctgtgcgcaaagtcctgccaaaagccgcttatctcgtttgaggtaagcggcttttttttgctgcgtcgtaggggccgcatatatgcggcccgcgggttggcgggagagacccgaccacggctggcatctggaatgctaaacaggcgtttacttacgatgcgccgaaaaaagaggatgtggactgatccacatcctctgaaacaaaaacaaatccgaaacaacgcttcacaaagaagattgagttcg

SEQ ID NO: 31205 - DNA, 260 bp, Unknown
  Description of Unknown: RightRegion for integrase B5206 sequence
gaagtgttcggacgctgtgcgcaaagtcctgccaaaagccgcttatctcgtttgaggtaagcggttttttgttttttgctgcgttgtaggggccgggcacgcccggcccgcgggttggcgggagagccccgaccacggctggcatctggaatgctaaacaggcgtttacttacgatgtgctgaaaaaagaggatgtggactgatccacatcctctaaaacaaaaacaaatccgaaacaatgcttcacaaagaagattgag

SEQ ID NO: 31206 - DNA, 260 bp, Unknown
  Description of Unknown: RightRegion for integrase B5207 sequence
atcaacttgggcgaacatgccatctaccccactccgtggggcttcgcaatcgccgcatagaaacgcgaaaaacgccccgccgcatctccgcgacggggcaccgagaccaaggagcaacccatgaccatccccgagataaccgaggcccttgagggcgcagccgccgtccttaccgacatgtccgcagagcatccagaccccaggctcgcgctcgtgatcgccgcgctcggggcctgcgcggaatcgctcgaccgcttgtg

SEQ ID NO: 31207 - DNA, 260 bp, Unknown
  Description of Unknown: RightRegion for integrase B5208 sequence
gaagtgttcggacgctgtgcgcaaagtcctgccaaaagccgcttatctcgtttgaggtaagcggctttttgttttttgctgcgtcgtaggggccgggcatgtgcggcccgcgggttggcgggagagacccgaccacggctggcatctggaatgctaaacaggcgcttacttgcgatgcgccgaaaaaagagggtgtggactgatccacatcctctaaaacaaaaacaaatccgaaacaatgcttcacaaagaagattgag

SEQ ID NO: 31208 - DNA, 260 bp, Unknown
  Description of Unknown: RightRegion for integrase B5209 sequence
aagaagaatcagaaaaactccgaattcactattgacgtttacccgaaagtaccgaaataatggtgctttcggattctattcattagttgcatcttctacgagcgtattcctccgtgccgatatccgtaagtgttgctgtcacctctttatatggcatggtgtaccgctgagataaataccgcatcgatgcagcgagctccccgtccgggccgccaaattgtgaaatgatcactttggcaatctgtgggttcgtttgtgta

SEQ ID NO: 31209 - DNA, 260 bp, Unknown
  Description of Unknown: RightRegion for integrase B5210 sequence
gagttcagcagagaatgtaattccgagttcatcctggatgtattcctgaaagaagattagaggtctatatccagttctaccgggcaatgatcggaacccatgattcctgtatggatcctggcatcccggatcttgtcctgcacaaaatcggaagtcaggaaatagtctattctccatccggcatttcgttccctggctttaaagcgatatgaccaccaggagtactcgatctgatccggatgcagatagcggtacgtgtc

SEQ ID NO: 31210 - DNA, 67 bp, Unknown
  Description of Unknown: RightRegion for integrase B5211 sequence
acttccaatgcaccagcatacggtcttccgacaatgcacctgtgccgaagaactgcttgatcagggt

SEQ ID NO: 31211 - DNA, 260 bp, Unknown; identical to SEQ ID NO: 31132
  Description of Unknown: RightRegion for integrase B5212 sequence

SEQ ID NO: 31212 - DNA, 260 bp, Unknown; identical to SEQ ID NO: 31143
  Description of Unknown: RightRegion for integrase B5213 sequence

SEQ ID NO: 31213 - DNA, 260 bp, Unknown
  Description of Unknown: RightRegion for integrase B5214 sequence
gatgtgttcggacgctgtgcgcaaagtcctgccaaaagccgcttatctcgtttgaggtaagcggctttttgttttttgttgcgttgtagggaccgggcatgtgcggcccgcgggtttgcgggagcgacccaaccacggctggcatctggaatgctaaacaggcgcttacttacgatgcgccgaaaaaagaggatgtggactgatccacatcctctaaaacaaaaacaaatccgaaacaatgctccacaaagaagattgag

SEQ ID NO: 31214 - DNA, 260 bp, Unknown
  Description of Unknown: RightRegion for integrase B5215 sequence
ggacgttggaataaggaagcacaagataatttttctattgaattagaactgaatctttaacatacatcataaatgttctaaagaaatggctcatgtagagatgataggaacaatggcatatcaacttatggaaaacgcttctatagatgaactaaaaaaagctggactagatggacactatgtagatcatggtaaagctttattctatacagatgctacaggcaacccttggactgcaacttatattcaagcaaaaggcg

SEQ ID NO: 31215 - DNA, 260 bp, Unknown
  Description of Unknown: RightRegion for integrase B5216 sequence
ccagacgaatctgaaagcggttcttgtaatattagatttggctcccccgactggacttgaaccagtgacaccctgattaacagtttcccaagggcacaagggcatacaaaaaggatcatgaatcccgcttgtatgctcttgtgccctttttttgttttatctatctatcaatcactttggagcgcagcgggcgaatgctcgaaaacgcacacgcgtgttcgaaactttgttggaaactcgccgggttgagtaattttcac

SEQ ID NO: 31216 - DNA, 147 bp, Unknown
  Description of Unknown: RightRegion for integrase B5217 sequence
aaaaaaagactttcaaagttcaacatcaaaatatatccaagacttagatataataaataagttataactattatcatcaaactgataaccaatttaacgtcatgagtggtgcatttgctggaggtgaaggagattacgttgcgttat

SEQ ID NO: 31217 - DNA, 260 bp, Unknown
  Description of Unknown: RightRegion for integrase B5218 sequence
aagaaaaaccagaaaaactctgaattcacaatcgatgtgtacccgaaagtgccgaaataacggtgctttcggagtatatttatcagctgcatcttttacgagcgtattcctccgtgccgatatccgtaagtgttgctgtcacctctttatatggcatggtataccgctgagataaataccgcatcgatgcagcgagctccccgtccgggccgccaaattgtgaaatgatcactttggcaatctgtgggttcgtttgtgta

SEQ ID NO: 31218 - DNA, 260 bp, Unknown
  Description of Unknown: RightRegion for integrase B5219 sequence
aagaaaaaccagaaaaactctgaattcacaatcgatgtgtacccgaaagtgccgaaataacggtgctttcggagcatatttattagttgcatcttctacgagcgtattcctccgtgccgatatccgtaagtgttgctgtcacctctttatatggcatggtgtaccgctgagataaataccgcattgatgcagcgagctccccgtccgggccaccaaattgtgaaatgatcactttggcaatctgtgggttcgtttgtgta

SEQ ID NO: 31219 - DNA, 260 bp, Unknown
  Description of Unknown: RightRegion for integrase B5220 sequence
aaaaaagggcagaaacaatccgaattttcaatagacgtatatccgaaagtgccgaaataacggcgcttttcaggtgtttctcgttagttgcatcttctacgttcccattcttccgtaccaatatcagtcaatgtagcggtcacttctttatacggcatcgtatagcgctgtgccaaatatcgcatcgatgccgccagctcaccgtccggtcctccaaactgcgtaatgataatctgtgcaattttaggattcgtctgtgt

SEQ ID NO: 31220 - DNA, 161 bp, Unknown
  Description of Unknown: RightRegion for integrase B5221 sequence
aagaaaaaccagaaaaactctgaattcacaatcgatgtgtacccgaaagtgccgaaataacggtgctttcggagtatatttattagctgcatcttttacgagcgtattctttcgcacatctaagatgcaactaatacacattaaataagtagtaacttttt

SEQ ID NO: 31221 - DNA, 109 bp, Unknown; identical to SEQ ID NO: 31149
  Description of Unknown: RightRegion for integrase B5222 sequence

SEQ ID NO: 31222 - DNA, 260 bp, Unknown
  Description of Unknown: RightRegion for integrase B5223 sequence
aagaaaaaccagaaaaactctgaattcacaatcgatgtgtacccgaaagtgccgaaataacggtgctttcggagtatatttattagctgcatcttttacgagcgtattcctccgtgccgatatccgtaagtgttgcggtcacctctttatatggcatggtataccgctgagataaataccgcattgatgcagcgagctccccgtccggtccgccaaattgtgaaatgatcactttggcaatctgtgggttcgtttgtgta

SEQ ID NO: 31223 - DNA, 260 bp, Unknown
  Description of Unknown: RightRegion for integrase B5224 sequence
aagaaaaaccagaaaaactctgaattcacaatcgatgtgtacccgaaagtgccgaaataacggtgctttcggagtatattcattagctgcatcttttacgagcgtattcctccgtgccgatatccgtaagtgttgctgtcacctctttatatggcatggtgtaccgctgagataaataccgcatcgatgcagcgagctccccgtccgggccgccaaattgtgaaatgatcactttggcaatctgtgggttcgtttgtgta

SEQ ID NO: 31224 - DNA, 106 bp, Unknown
  Description of Unknown: RightRegion for integrase B5225 sequence
ggcctggatggcttcgacgacaaagaaaaaccggacggtttacttccgcgtcacaggtagggtgttaaaaatccagataattcaaggttggaaaagaggcgacagc

SEQ ID NO: 31225 - DNA, 101 bp, Unknown
  Description of Unknown: RightRegion for integrase B5226 sequence
accaaaatgatgacgggaaatcctgggtgttcgcgttgcgaacgtttggtgacccggtagggattcgaaccctagacctactgattcgtagtcagtcactc

SEQ ID NO: 31226 - DNA, 260 bp, Unknown; identical to SEQ ID NO: 31128
  Description of Unknown: RightRegion for integrase B5227 sequence

SEQ ID NO: 31227 - DNA, 260 bp, Unknown
  Description of Unknown: RightRegion for integrase B5228 sequence
gaagtgttcggacgctgtgcgcaaagtcctgccaaaagccgcttatctcgtttgaggtaagcggcttttttgttgcgttgtaggggccgcatatatgcgacccgcgggttggcgggagagacccgaccacggctggcatctggaatgctaaacaggcgcttacttacgatgcgccgaaaaaagaggatgtggactgatccacatcctctaaaacaaaaacaaatccgaaacaatgcttcacaaagaagattgagttcgga

SEQ ID NO: 31228 - DNA, 260 bp, Unknown
  Description of Unknown: RightRegion for integrase B5229 sequence
aagaaaaaccagaaaaactctgaattcacaatcgatgtgtacccgaaagtgccgaaataacggtgctttcggagtatatttattagctgcatcttttacgagcgtattctttcgcacatccaagatgcaactaatccacattaaataagtagtaacttttttgacaaaaataagattgatacaatattcaggacggcaactccatccgtccaacactcatatacgccgcccgtaaaaaggtgtgcatcatttcggttgtc

SEQ ID NO: 31229 - DNA, 260 bp, Unknown
  Description of Unknown: RightRegion for integrase B5230 sequence
cccttactattgctctatgttcctctccccgcgggcatatttcgccatagaggtgcctagcgttcgttctaagggactttcgagcattcaccctcaaaactataccctaaaatttaaaacgccttagaattgattctagtggcattctgagcgatttgctctgtattgtgaatattgtacaaatcataagcttgtattttgtgcatgtatacaaaagtgttcccattgtcataaaacgcttgacaaatgttcccgaatgg

SEQ ID NO: 31230 - DNA, 260 bp, Unknown
  Description of Unknown: RightRegion for integrase B5231 sequence
cccttgctgttgtgctatgttcctctccctgcgggtatatttcgccgtagaggtgcctagcattcgttctaaggcgttttcgaatgctccccctcaaaactataccctaaaatttaaaacgccttagaatcgattttaagggcattctgagcgatttcatctatcttgtgaatactgcacaaatcataagcttgtattttgtgcaagtatacaaaaatgttcccattgtcataaaacacttgacaaatgttcccgaatgg

SEQ ID NO: 31231 - DNA, 109 bp, Unknown
  Description of Unknown: RightRegion for integrase B5232 sequence
agccgatggaacaaggatgcacaagacaaattcattcttgaattagagctattactttaacatacatcttaaatgttcaatagaaatggcacacgtagaaataatagct

SEQ ID NO: 31232 - DNA, 260 bp, Unknown
  Description of Unknown: RightRegion for integrase B5233 sequence
aaaaaggggcagaatcgttctgattttgaaattgacgtgtttccaaaagtaccgaaatagcggcgttctttcgctcgttgcatcttctacgagcgaaagaactcgctcacatggaaatggtatgcgccatcgtttatcagctcaccaaggacctttctccggaggaaatcgaacgctccggatttgctccttattatgtagatcacacacttgctctctggccacaggcagcaagcggcgccccatggacagcaacttat

SEQ ID NO: 31233 - DNA, 109 bp, Unknown
  Description of Unknown: RightRegion for integrase B5234 sequence
ggacgttggaataaggaagcacaagataatttttctattgaattagaactgaatctttaacatacatcataaatgttctaaagaaatggctcatgtagagataatagct

SEQ ID NO: 31234 - DNA, 109 bp, Unknown
  Description of Unknown: RightRegion for integrase B5235 sequence
gtcgaactcttcttctacaagaatgagtttgcgcttgtgtataggttgggggacgcctgatggcgtcccctttccgttcccgttgccgtgaaacgccgtattttgcgtt

SEQ ID NO: 31235 - DNA, 260 bp, Unknown
  Description of Unknown: RightRegion for integrase B5236 sequence
gcagaggaattggctgttagcagtgttcgattaagctccgcaagcagccaccatacttgagaaatccgaacttgattccgatagggaatgggttcggatttcttgtttttatcaaggacattgaagtttagtttcgggatagaataacatcaaattcaggaggatatacccatggaaaagctcataagctgtgcgttcaatatggataccgcctgtgtggagcttcgcttcacggacgggagcatttgctccatcgactg

SEQ ID NO: 31236 - DNA, 109 bp, Unknown
  Description of Unknown: RightRegion for integrase B5237 sequence
tcacaaaatgtggctgtttttgtttactgtattttttcgttggctctgaatagcttttaatatggactactttttcggaggtcgctatggaacaggcacagtataatat

SEQ ID NO: 31237 - DNA, 109 bp, Unknown
  Description of Unknown: RightRegion for integrase B5238 sequence
gaagctgcgggcgggtgttcggctcagctcccgccatctccaccacgaaagtcaggttaaaataaatgcaggtttgcatttgctttaacctgacttttttgttatactg

SEQ ID NO: 31238 - DNA, 260 bp, Unknown
  Description of Unknown: RightRegion for integrase B5239 sequence
ttcgcttccaatgcaccagcttcgcagagcccaaagctgacttcgcgcaggctcgtctgagccgtgaagcaggcgagaacgctggcacttatccgatttacagcggtgacatctttgagcagccgatggcgaagaactatcgcatcagcttcaccaatgatgtccgcttcaccatcaataagcgcactgccgttatcaacctgcttgagaccgagaagacctacggtgagaccatcacttctatgaatgtgaaggattac

SEQ ID NO: 31239 - DNA, 260 bp, Unknown
  Description of Unknown: RightRegion for integrase B5240 sequence
cagaataatccgaaactttttatctataaaaatgttttcgggcaaacaaaaacacactgaaatcagtgtgctttttattttactatagcccttttcgaataaggattttaaaggcttctgtagtggtatatccttgctcgaagagctcattaagtgcagataaaatgtcctcatcctctatctttcgcaatgataagataaatcgctgatataccttttttttgtatttcgcggttgcctcaagctgcgcgtccgatgtt

SEQ ID NO: 31240 - DNA, 260 bp, Unknown
  Description of Unknown: RightRegion for integrase B5241 sequence
gcccgtggccaacggcattcttctttttccatagacgtttttccgcgtatttctcgctgatcttttttacttccatcttgtatgtgctgattcctctgtgccaatatcggttaaaattcctgtcacttctttgtacggcatggtgtacctctgtgataaataacgcatggacgcagctaattctccatccggtccaccgaactgcgtaataataatctgtgcaattttcggattggtctgtgtgattttcaccggatact

SEQ ID NO: 31241 - DNA, 260 bp, Unknown
  Description of Unknown: RightRegion for integrase B5242 sequence
gcccatggccaacggcattcttctttttccatagacgtttttccgcgtatttctcgctgatcttttttacttccatcttgtatgtgctgattcgtttgcacatacaagatggaagtattttcttccttatttataataggatattttaaaggaatgttgcgaaactatctaaactgaatcgcctcaatttgcaatgcctgtccgactgtacccagtgtagatacgccgtcggctttcgtccagtctgtccaaccggaatt

SEQ ID NO: 31242 - DNA, 260 bp, Unknown
  Description of Unknown: RightRegion for integrase B5243 sequence
gcccgtggccaacggcattcttctttttccatagacgtttttccgcgtatttctcgctgatcttttttacttccatcttgtatgtgctgattcctctgtgccaatatcggttaaaattcctgtcacttctttgtacggcatggtgtacctctgtgataaataacgcatggacgcagctaattctccatccggtccaccgaactgactgatgattacctgggccatcttcggattggtctgggtaatttttacgggatatt

SEQ ID NO: 31243 - DNA, 260 bp, Unknown
  Description of Unknown: RightRegion for integrase B5244 sequence
aaaatagagttcagtagagaaaataataaagaatttatccttgatgtgttcttgaagtaatcttcaaggataatattttgtgaccaatatctatcatgggtgtgctatatttaaatctccaccatgatacaaatatacttaaaaaggatgatgtaaatgcgtataatatggaaagatagtttcgctaaagaatcatataagcctataagatacagaggatataccgctttgtgttgtcaagatagtgatgggtggattac

SEQ ID NO: 31244 - DNA, 260 bp, Unknown
  Description of Unknown: RightRegion for integrase B5245 sequence
aatccgaacatttttgtaacgcttgacgtgttcgggttagtcgttcagattgaacgctaaagaaataaccccgctttccggtaagggaaggcggggttattctcttttcctgctcatagctgcgcgaatagcaagcgccgccatgcagtaatttgttattgcttcgttcttttgcctgtaaagctccgacaggctcaacccatacattgcttgcagttttgcccgatgtcccgcatagcggcaacgccgatctatgaaga

SEQ ID NO: 31245 - DNA, 260 bp, Unknown
  Description of Unknown: RightRegion for integrase B5246 sequence
ccgttcctgttgctctatgtttcgctaccagaacgcagaaatcaacgagaacgcccctagaatcgtttctacggcgttttaagccgttcaccctcaaaactataccctaaaaacgaaaagccgcttagaaacgattctaggcggcttttgattcatttgcttacaatttcaccagcaccccacggagcgcctgcggctgttccagaatataccactttggggattcccttgaacgcattgacgccgattgtgcttacaga

SEQ ID NO: 31246 - DNA, 260 bp, Unknown
  Description of Unknown: RightRegion for integrase B5247 sequence
ctggatacggtccggcggctgctggacgacaacgctgcagcccccatgcagccaacataacaagaaacagcttgcagctggccgccaaaaaggcggcagcatcgccaggaagaacccttctcatgccatgcgccggtgcagcagcaccgcaagcaaggagtgacagaacattgtacagacaaaaaagcgccgcagcggtttgcgctgcggcaaaaaaagaagctcccctttcggagagcttcccggatcataccgaatgt

SEQ ID NO: 31247 - DNA, 260 bp, Unknown
  Description of Unknown: RightRegion for integrase B5248 sequence
gcccgtggccaacgacattcttctttttccatagacgtttttccgcgtatttctcgctgatcttttttacttccatcttgtatgtgctgattcctctgtgccaatatcggttaaaattcctgtcacttctttgtacggcatggtgtacctctgtgataaataacgcatggacgcagctaattctccatccggtccaccgaactgactgatgattacctgggccatcttcggattggtctgggtaatttttacgggatatt

SEQ ID NO: 31248 - DNA, 260 bp, Unknown; identical to SEQ ID NO: 31242
  Description of Unknown: RightRegion for integrase B5249 sequence

SEQ ID NO: 31249 - DNA, 260 bp, Unknown; identical to SEQ ID NO: 31242
  Description of Unknown: RightRegion for integrase B5250 sequence

SEQ ID NO: 31250 - DNA, 187 bp, Unknown
  Description of Unknown: RightRegion for integrase B5251 sequence
acaaaggaccataggggcaacgattttgatttagatatagaatggcgtttcactatgtaaaccctcgtttttatgcggtttcttgaccgttttaattttgtatgctcattttttctaacttgaacagtcttgttccctgcaactgtcatatatcttatcagtatgtacacacactgcttcacggaaa

SEQ ID NO: 31251 - DNA, 109 bp, Unknown
  Description of Unknown: RightRegion for integrase B5252 sequence
gcccgtggccaacggcattcttctttttctatagacgtttttccgcgtatttctcgctgatcttttttacttccatcttgtatgtgctgattcctctgtgccaatatcg

SEQ ID NO: 31252 - DNA, 260 bp, Unknown; identical to SEQ ID NO: 31244
  Description of Unknown: RightRegion for integrase B5253 sequence

SEQ ID NO: 31253 - DNA, 260 bp, Unknown
  Description of Unknown: RightRegion for integrase B5254 sequence
ttccgaaacgaaaacccagcggtcgcgctctccatccactgctatcctcgcaggtattaagggtatcatgcccgtaacgattcatcccaccccgcttgatacccgcaaatccccctcattcatccatcccattttcccttttcaaatcaaattctcgatcctgcatccaagcacgcccgcgattttcacaagcgtctcaatgcgtggcgcacgcccgttctcccatcggctcacgtctttttgcagacagccgatcttct

SEQ ID NO: 31254 - DNA, 260 bp, Unknown
  Description of Unknown: RightRegion for integrase B5255 sequence
gcaatccaattcgaactcatcaatggcatgaagttatcagaaagccgtgcagccacatgaagaacaggtacattcctttcggctataagattcaaaatggagattcagtcatcaacacggaacaagccgcaactgtacaacacatattctatgcgtataccgaaggacagagttttaaggaaattgcagaatacttgaccacaagtggcacagcctatcacttttcagataataactggaacaaaaatatcgttgcccgc

SEQ ID NO: 31255 - DNA, 145 bp, Unknown
  Description of Unknown: RightRegion for integrase B5256 sequence
gcccgtggccaacggcattcttctttttccatagacgtttttccacgtatttctcgctgatcttttttacttccatcttgtatgtgctgattcctctgtgccaatatcggttaaaattcctgtcacttctttgtacggcatggtg

SEQ ID NO: 31256 - DNA, 260 bp, Unknown
  Description of Unknown: RightRegion for integrase B5257 sequence
ttcgctgataattcaccaggtacgaaatcctccccgaagaagccgagcaaatccgcttaatgtatgagttgtatgcaaaaccgcaaacatcttatggcgacattgccagatacttttctgaacacggtatttttaaaaacgggaaagagtggtgcaggacaaggcttgcagaccatctcagaaatccaatttatgtaaaggcagatgaggaggtgtatgacttttacaagaggcagggagttgaaatcgtgaacgacaga

SEQ ID NO: 31257 - DNA, 145 bp, Unknown
  Description of Unknown: RightRegion for integrase B5258 sequence
gcccgtggccaacggcattcttctttttccatagacgtttttccgcgtatttctcgctgatcttttttacttccatcttgtatgtgctgattcctctgtgccaatatcggttaaaattcctgtcacttctttgtacggcatggtg

SEQ ID NO: 31258 - DNA, 260 bp, Unknown
  Description of Unknown: RightRegion for integrase B5259 sequence
cgtgctgacagtattatttcaacattgaagtatatggatgaaaacactgtttacttttagcgatttaataaacacatatctaataacgtgtgctcactttatcgataagctgcattcttacaatttgcaatgtggctggagagattcactcacctgaatgattctccatatggcatgactaaaccaaaccctgttcaggcactgagatagccatataaatcaaggcctggacgggttttcgttcctttctgaccctgtat

SEQ ID NO: 31259 - DNA, 260 bp, Unknown
  Description of Unknown: RightRegion for integrase B5260 sequence
aattcgaacatttttgtaatgcttgatgtgttcgggttagtcgttcagattgaacgataaagaaataaccccgctttcctgtaagggaaggcggggttattctcttttcctgctcatagctgcgcggatagcaagcgccgccatgcagtaatttgttattgctccgtttttttgcctgtaaagctccgacaggctcaatccgtacattgcttgcagttttgcccgatgtcctgcatagcggcaatggcgatctatgaaga

SEQ ID NO: 31260 - DNA, 260 bp, Unknown
  Description of Unknown: RightRegion for integrase B5261 sequence
gtaggcgaacatatgcaggtgttcgtcgttaggcgggcgttcgtgttgctcgtcgaatagaagaagccgctccatacggggcggcttctttgcgttctaggcctgcggcatgatctcctgctcgccgtcctcgtccatgtacggcatgaggaacacgccgccctgctcggtggtaagcagcaggtactcgcggttgtgctcgtcgcacacgatttcctggccgatgccctcgggcaggtcgtatatggggccgtccgtgc

SEQ ID NO: 31261 - DNA, 260 bp, Unknown; identical to SEQ ID NO: 31247
  Description of Unknown: RightRegion for integrase B5262 sequence

SEQ ID NO: 31262 - DNA, 260 bp, Unknown; identical to SEQ ID NO: 31244
  Description of Unknown: RightRegion for integrase B5263 sequence

SEQ ID NO: 31263 - DNA, 260 bp, Unknown
  Description of Unknown: RightRegion for integrase B5264 sequence
gcaatccaattcgaactcatcaatggcatgaagttatcagaaagccgtgcagccacatgaagaacaggtacattcctttcggctatcagattcaaaatggagattcagtcatcaacacggaacaagccgcaactgtacaacacatattctatgcgtataccgaaggacagagttttaaggaaattgcagaatacttgaccacaagtggcacagcctatcacttttcagataatagctggaacaaaaatatcgttgcccgc

SEQ ID NO: 31264 - DNA, 260 bp, Unknown
  Description of Unknown: RightRegion for integrase B5265 sequence
gtgttccatgatgggagtttggtgtttctattccgagatgggacggagataaaagtgtgagataattacagccctgttggagaaatccggcagggctgtttttttttcataactcaagtccataattgtaaaatcctggccttgccggaagctttccaacaccttggaaacaatccaacaaggctgctttttcactcctttttcctctccaaaacccacttaattttattaagtccaatcgacacccctcaaaaaacgcc

SEQ ID NO: 31265 - DNA, 109 bp, Unknown
  Description of Unknown: RightRegion for integrase B5266 sequence
ggttcgtatttgggcgggtcaggggtaccaaaggggagttcttataggactcccctttgaactttttgtgaacatttttcagaagctgcacgttggtgtgcaacttttc

SEQ ID NO: 31266 - DNA, 260 bp, Unknown
  Description of Unknown: RightRegion for integrase B5267 sequence
ccgttcctgttgctttatgtttcgctaccagaacgcagaaatcaacgagaacgcccctagaatcgtttctacggcgttttaagccgttcacactcaaaactatactctaaaaacgaaaagccgcttagaaacgattctaggcggcttttgagttattcgcttacaatttcaccagcaccccacggagcgcctgcggctgttccagaatataccactttggggatgtccttgaacgcattgacgccgattgtgcttacaga

SEQ ID NO: 31267 - DNA, 260 bp, Unknown
  Description of Unknown: RightRegion for integrase B5268 sequence
ccgttcctgttgctctatgtttcgctaccagaacgcagaaatcaacgagaacgcccctagaatcgtttctacggcgttttaagccgttcgccctcaaaactacaccctaaaaacgaaaagccgcttagaaacgattctaggcggcttttgactcatttgcttacaatttcgcctgcgccccacggagcgcctgcggctgttccagaatataccactttagggatacccttgaacgcattgacgccgattgtggttacaga

SEQ ID NO: 31268 - DNA, 109 bp, Unknown
  Description of Unknown: RightRegion for integrase B5269 sequence
gatgttgagttggtggagatgaggggagtcgaacccctgtccgaaaatattgcaatatgactttctccgagcgcagccgctaatttagattttgcttccttgacgccaa

SEQ ID NO: 31269 - DNA, 260 bp, Unknown
  Description of Unknown: RightRegion for integrase B5270 sequence
acaaaggaccataggggtaacgattttgatttagatatagaatggcgtttcactatgtaagccctcgtttttatgcggtttcttgaccgttttaattttgtatgctcatttttctaacttgaatagtcttgttccctgcaactgtcatatatcttatcagtatgtacacacactgcttcacggaaatttgtatcacaaggatattttctttctcttccgcagtcattacagcaatttctgttacaatcagccatttatta

SEQ ID NO: 31270 - DNA, 260 bp, Unknown
  Description of Unknown: RightRegion for integrase B5271 sequence
gtaggcgaacacatacgcgtgttcgtcgttaggcgggcgttcgtattgctcgtcagatagaaagaagccgctccatacggggcggcttctttgcgttctaggcctgcggcatgatctcctgctcgccgtcctcgtccatgtacggcatgaggaacacgccgccctgctcggtggtaagcagcaggtactcgcggttgtgctcgtcgcacacgatttcctggccgatgccctcgggcaggtcgtatatggggccgtccgtg

SEQ ID NO: 31271 - DNA, 260 bp, Unknown
  Description of Unknown: RightRegion for integrase B5272 sequence
cggaataatccgaaactttttatctacaaaaacgttttcgggcaaacaaaagcacactgaaatcagtgtgcttttttctttttttattgcattccttttcggataagaattttaaaagattctgtagtcgtgtacccttgatcaaaaagttctttgagtgccgataaaatatcggcatcgtcaatctttcttagcgaaacaatgaatctctcgtaggttttgatattgtatcgcgtatttgctgctattcttgcatctga

SEQ ID NO: 31272 - DNA, 260 bp, Unknown
  Description of Unknown: RightRegion for integrase B5273 sequence
aatccgaacatttttgtaacgcttgacgtgttcgggttagtcgttcagattgaacgctaaagaaataaccccgttttccggtaagggaaggcggggttattctcttttcctgctcatagctgcgcgaatagcaagcgccgccatgcagtaatttgttattgcttcgttcttttgcctgtaaagctccgacaggctcaacccatacattgcttgcagttttgcccgatgtcccgcatagcggcaacgccgatctatgaaga

SEQ ID NO: 31273 - DNA, 260 bp, Unknown; identical to SEQ ID NO: 31244
  Description of Unknown: RightRegion for integrase B5274 sequence

SEQ ID NO: 31274 - DNA, 260 bp, Unknown
  Description of Unknown: RightRegion for integrase B5275 sequence
ggttcgtatttgggcgggtcaggggtaccaaaggggagttcttataggactcccctttgaacttttcgtgaacatttttcagaagctgcacgttggtgtgcaacttttctctgttttgaaactatggatagaaggactttttccttactacaacattcggaggtttctatgacagaggaaaactacaattaccgtacaagtcaaactctcttgcgtaaccagttcccagggaaagggaaatggaaaattccggtaatacc

SEQ ID NO: 31275 - DNA, 260 bp, Unknown; identical to SEQ ID NO: 31244
  Description of Unknown: RightRegion for integrase B5276 sequence

SEQ ID NO: 31276 - DNA, 260 bp, Unknown
  Description of Unknown: RightRegion for integrase B5277 sequence
ttcacttccaatgcaccagcttcgcagaacccaaggctgacttcgcacaggctcgtctgagccgtgaagcaggcgagaacgctggcacttatccgatttacagcggtgacatctttgagcagccgatggcgaagaactatcgcatcagcttcaccaatgacgttcgcttcaccatcaataagcgcactgccgttatcaacctgcttgagaccgagaagacctacggtgagaccatcacttctatgaatgtgaaggattac

SEQ ID NO: 31277 - DNA, 260 bp, Unknown; identical to SEQ ID NO: 31244
  Description of Unknown: RightRegion for integrase B5278 sequence

SEQ ID NO: 31278 - DNA, 260 bp, Unknown
  Description of Unknown: RightRegion for integrase B5279 sequence
gcccgtggccaacggcattcttctttttttatagacgtttttccgcgtatttctcgctgatcttttttatttccatcttgtatgtgctgattcgtttgcacatacaagatggaagtatttttcttccttatttataataggatattaacacatcttcttatgaattgacagcttattattttatcctaagtttctgccctacataaatcagattcgggttagacatgccgttgagctgtgcaatcttctggtaggttgtg

SEQ ID NO: 31279 - DNA, 260 bp, Unknown
  Description of Unknown: RightRegion for integrase B5280 sequence
gcccgtggccaacggcattcttctttttctatagacgtttttccgcgtatttctcgctgatcttttttacttccatcttgtatgtgccgattcctctgtgccaatatcggttaaaattcctgtcacttctttgtacggcatggtgtacctctgtgataaataacgcatggacgcagctaattctccatccggtccaccgaactgactgatgattacctgggccatcttcggattggtctgggtaatttttacgggatatt

SEQ ID NO: 31280 - DNA, 260 bp, Unknown
  Description of Unknown: RightRegion for integrase B5281 sequence
ccgttcctgttgctctatgtttcgctaccagaacgcagaaatcaacgagaacgcccctagaatcgtttctacggcgttttaagccgttcaccctcaaaactatactctaaaaacgaaaagccgcttagaaacgattctgggcggcttttgactcatttgtttacaatttcaccagcaccccacggagcgcctgcggctgttccagaatataccactttagggatacccttgaacgcattgacgccgattgtggttacaga

SEQ ID NO: 31281 - DNA, 260 bp, Unknown
  Description of Unknown: RightRegion for integrase B5282 sequence
aaaatagagtttagtagagaaaataataaagaatttatccttgatgtgttcttgaagtaatcttcaaggataatattttgtgaccaatatctatcatgagtgtgctatatttaaatcaccaccatgatacaaatatacttaaaaaggatgatgtaaatgcgtataatatggaaagatagtttcgctaaagaatcatataagcctataagatacagaggatatacagttttgtgttgtcaagatagtgatggatggattac

SEQ ID NO: 31282 - DNA, 260 bp, Unknown; identical to SEQ ID NO: 31270
  Description of Unknown: RightRegion for integrase B5283 sequence

SEQ ID NO: 31283 - DNA, 260 bp, Unknown
  Description of Unknown: RightRegion for integrase B5284 sequence
aatcgatcaagcaatcctgccgagcatctaacactcgacatctaccccaaggttgattaggcagggcacaataatacgggtatcctgtgtgttgtgatgagtcacaacacgcatgatacccgcagtccttacttatactcctccaccatcgcgcggacccgcgcagtcttggcctggagcatggccagatcgtccgaccagctctccagtttaccgcgctcacgctcggtggtagtttcagcggcctcgcacttggcgat

SEQ ID NO: 31284 - DNA, 260 bp, Unknown; identical to SEQ ID NO: 31263
  Description of Unknown: RightRegion for integrase B5285 sequence

SEQ ID NO: 31285 - DNA, 260 bp, Unknown
  Description of Unknown: RightRegion for integrase B5286 sequence
aaaatagagtttagtagagaaaataataaagaatttatccttgatgtgttcttgaagtaatcttcaaggataatattttgtgaccaatatctatcatgggtgtgctatatttaaatctccaccatgatacaaatatacttaaaaaggatgatgtaaatgcgtataatatggaaagatagtttcgctaaagaatcatataagcctataagatacagaggatataccgctttgtgttgtcaagatagtgatgggtggattac

SEQ ID NO: 31286 - DNA, 260 bp, Unknown
  Description of Unknown: RightRegion for integrase B5287 sequence
gaagctgtgggcgggtgttcggctcagctcccgccatctccaccacgaaagtcaggttaaaataaatgcaggtttgcatttgctttaacctgacttttttgttatactgcaatcaaggttatttatataatatacggaatacagagcaatcatttaaaattctagaggaagaacagtgtttagagagatattaacagaattaattaaagataacgaatgggcaaagttgcaaaaaccgtgtgatgagagtgaacttgcta

SEQ ID NO: 31287 - DNA, 260 bp, Unknown; identical to SEQ ID NO: 31242
  Description of Unknown: RightRegion for integrase B5288 sequence

SEQ ID NO: 31288 - DNA, 260 bp, Unknown
  Description of Unknown: RightRegion for integrase B5289 sequence
aatccgaacatttttgcaacgcttgacgtgttcgggttagtcgttcagattgaacgctaaagaaataaccccgctttccggtaagggaaggcggggttattctcttttcctgctcatagctgcgcgaatagcaagcgccgccatgcagtaatttgttattgcttcgttcttttgcctgtaaagctccgacaggctcaacccatacattgcttgcagttttgcccgatgtcccgcatagcggcaatgccgatctatgaaga

SEQ ID NO: 31289 - DNA, 260 bp, Unknown
  Description of Unknown: RightRegion for integrase B5290 sequence
aattcgaacatttttgtaacgcttgatgtgttcgggttagtcgttcagattgaacgataaagaaataaccccgctttcctgtaagggaaggcggggttattctcttttcctgctcatagctgcgcggatagcaagcgccgccatgcagtaatttgttattgctccgtttttttgcctgtaaagctccgacaggctcaatccgtacattgcttgcagttttgcccgatgtcctgcatagcggcaatggcgatctatgaaga

SEQ ID NO: 31290 - DNA, 260 bp, Unknown
  Description of Unknown: RightRegion for integrase B5291 sequence
aaaatagagtttagtagagaaaataataaagaatttatccttgatgtgttcttgaagtaatcttcaaggataatattttgtgaccaatatctatcatgggtgtgctatatttaaatctccaccatgatacaaatatacttaaaaaggatgatgtaaatgcgtataatatggaaagatagtttcgctaaagaatcatataagcctataagatacagaggatatacagttttgtgttgtcaagatagtgatgggtggattac

SEQ ID NO: 31291 - DNA, 260 bp, Unknown
  Description of Unknown: RightRegion for integrase B5292 sequence
tcatttgaatttgaactcatcaatggtatgagggtgtcggagaggagaacttcaaaatgaggaaacgatatcttcctttcggttatcaaatcgaacaaggcaaaattgcgattgtatcaaaagaaagcaacgcagttagattcatctttgaggaatacctggcaggaaagtctcttaaaggaattgcagatattatgtctgcaaaagatatcccttatcatgaaggcacccaaaaatggaatcaaaacatggtgggacga

SEQ ID NO: 31292 - DNA, 260 bp, Unknown
  Description of Unknown: RightRegion for integrase B5293 sequence
aatccgaacatttttgtatcgcttgatgtgttcgggttagtcgttcagattgaacgctaaagaaataaccccgctttccggtaatggaaggcggggttattctatttcgctgaatgaagtacacataccagcgccgtgtagtaatgcaaaagcgccgtatctttgaagcggtacaatactgaattttccatgttaagcgccgcttgaagtttgatccggtcagcgcgtccgtgattgcgattgatgtagaaccattcaag

SEQ ID NO: 31293 - DNA, 260 bp, Unknown
  Description of Unknown: RightRegion for integrase B5294 sequence
gcccgtggtcaacggcattcttctttttccatagacgtttttccacgtatttctcgctgatcttttttacttccatcttgtatgtgctgattcctctgtgccaatatcggttaaaattcctgtcacttctttgtacggcatggtgtacctctgtgataaataacgcatggacgcagctaattctccatccggtccaccgaactgactgatgattacctgggccatcttcggattggtctgggtaatttttacgggatatt

SEQ ID NO: 31294 - DNA, 109 bp, Unknown
  Description of Unknown: RightRegion for integrase B5295 sequence
aactgtgtattcgacaaggacagctacacccttgcgataacctatcgcattattttgtgacccattttataggctattggagtacggcggtcccgacggggagctgggc

SEQ ID NO: 31295 - DNA, 260 bp, Unknown; identical to SEQ ID NO: 31242
  Description of Unknown: RightRegion for integrase B5296 sequence

SEQ ID NO: 31296 - DNA, 260 bp, Unknown
  Description of Unknown: RightRegion for integrase B5297 sequence
ttccgaaacgaaaacccagcggtcgcgctctccatccactgctatccccgaaggtattaagggtatcatgcccgtaacgattcatcccaccccgcttgatacccgcaaatccccctcattcatccgtccccattttcccttttcaaatcaaatcttcgatcctgcatccaagcacgcccgcgattttcacaagcgtctcaatgcgcggcgcacgcccgttctcccatcggctcacgtctttttgcagacaaccgatcttc

SEQ ID NO: 31297 - DNA, 147 bp, Unknown
  Description of Unknown: RightRegion for integrase B5298 sequence
aaaaaaagaacttcaagatttaatatcaaaatatatccaaggttaataaaaaataagtaaattataactgttatcatcaaactgataaccaatttaacgtcatgagtggtgcatttgctggaggtgaaggagattacgttgcgttat

SEQ ID NO: 31298 - DNA, 260 bp, Unknown
  Description of Unknown: RightRegion for integrase B5299 sequence
cagaatggctgcggattccatgtcgcagatgtcggctccgaactcattgtgcagccatagcttctctgcggcgtctcccacaaacttgtcgccggatgcgcaaaccacccgatggagttcgggggaggccaaatccgtgaaagcagtgcttaccggcagcagccggtccgggtattccaaatagcggccagccggcacattatcaacagcaaacaggtcatattggtaatgcgccacctttaccacgacacatatctcgc

SEQ ID NO: 31299 - DNA, 62 bp, Unknown
  Description of Unknown: RightRegion for integrase B5300 sequence
ttcacttccaatgcaccagttttgccggatctatatttccttttttatcacaatccttaggc

SEQ ID NO: 31300 - DNA, 260 bp, Unknown
  Description of Unknown: RightRegion for integrase B5301 sequence
ttcgcttccaatgcacctccttgtcagaccagtccgaagacggccaggatcagcccgtagatcacgcttgcgctgatgccgtagacgatcaccggccctgcgatcgtgaagatcttgaccgccgtgcccgtgacgaagccctcggtcttgaattccagcgctggggacaccacggagtttgcaaaccccgtgatcggcaccagagatcctgccccggcgaaccgcgccagatcgtcgtaaacgcccagccccgtcagcag

SEQ ID NO: 31301 - DNA, 61 bp, Unknown
  Description of Unknown: RightRegion for integrase B5302 sequence
aatccgaacatttttgtaacgcttgacgtgttcgggttagtcgttcagattgaacgctaaa

SEQ ID NO: 31302 - DNA, 260 bp, Unknown
  Description of Unknown: RightRegion for integrase B5303 sequence
tgctattttaataagatagcaatcctacttttttacccaaaagtgtctcgaacgccttgaaatatggccattctcggcatttttcgctatcgctataagtaagattaaaaaggaatcctgaaccgggtttgtcccagctcaggattcttgcattcatggctctttttaagtaagaaataataattccatgacaggtctgcgcctccgttgaccacttgaacctcctgtgctatcatacgaatacaatactgtccatcagg

SEQ ID NO: 31303 - DNA, 260 bp, Unknown
  Description of Unknown: RightRegion for integrase B5304 sequence
ttggatattaaaggggcaccaaagaaaaaccgcttaggtaagccttttatggcagcctaggcggttttctttttgtgctgattttggcgcttgctcaagttctgctcaagtagcaccgaggaagtgccgagttagggcagaatagggaaaattacggcagattaggacaaaagagggaaagcggaaaagagcacccaaaacacaacaatttgagcagcgaaccagagaacacaggttaccccgtattggtgatgccacca

SEQ ID NO: 31304 - DNA, 260 bp, Unknown
  Description of Unknown: RightRegion for integrase B5305 sequence
ggtgaagtgttcggacgctgtgcgcaaagtcctgccaaaagaccgtcagtgaaaagctgacggtctttttgtgtttatatatcgaaaagtctccggcaagcaagcgggtcagactgccaatacagtgctacctgtactatgcatgtgttgtgttcccctgatgggcttgcctgcagggtcagtctgctttcacatcaaaatacgcttgcagatgccgtggccgtcttgcgctatgctgggtctggcgacaactgtagggg

SEQ ID NO: 31305 - DNA, 260 bp, Unknown
  Description of Unknown: RightRegion for integrase B5306 sequence
gcccgtggccaacggcattcttctttttccatagacgtttttccgcgtatttctcgctgatcttttttttacttccatcttgtatgtgctgattcctctgtgccaatatcggttaaaattcctgtcacttctttgtacggcatggtgtacctctgtgataaataacgcatggacgcagctaattctccatccggtccaccgaactgactgatgattacctgggccatcttcggattggtctgggtaatttttacgggata

SEQ ID NO: 31306 - DNA, 109 bp, Unknown
  Description of Unknown: RightRegion for integrase B5307 sequence
aaggaaattaggttcaatgggaatgatgaaattgaggttgtacttgtaggtggtatttaaactgggttgcacaacctgcccatccaccacctacaactataacttttat

SEQ ID NO: 31307 - DNA, 260 bp, Unknown
  Description of Unknown: RightRegion for integrase B5308 sequence
aatccgaacatttttgtaacgcttgacgtgttcgggttagtcgttcagattgaacgctaaaaaataaccccgctttccggtaatggaaggcggggttattctattctgctgaatgaagtacacataccaacgctgtgtagtagtgtaaaagtgccgtatctttgaagcggtacaataccgaattttccatgttaagcgccgcttgaagtttaatccggtcagcgcgtccgtgatttctgttgatatagaaccattcaagc

SEQ ID NO: 31308 - DNA, 260 bp, Unknown
  Description of Unknown: RightRegion for integrase B5309 sequence
tgttcatccttgagcacccctgctccaccaactcggtcacgattgcatatgcagtcgtgacttttttaggctctatgtcaatagttggggaaaacccgaaaaagaagaattgaaatgaacaagcgatagtaaatcaagctatcgcttgtttttgcatttggtgagaaaacatatgtaaaatacgattacggaaacgcttaaaatttctgtaaccataagcattacgcttgttctgtaagccgcctttaccgtagtataaa

SEQ ID NO: 31309 - DNA, 260 bp, Unknown
  Description of Unknown: RightRegion for integrase B5310 sequence
cagtcgctttctgaagtcactgagaggggtttaatagatgttgatgaggttatcatatagttgagattctatcgtcagtagcgcttgttaggattcacactaaacttccgtaaagcattacccgacttaagcacctttgaagcttgctcattagctgaggctgtgaaggtgctctcaccatttttaacgctaacgctcttagagcacgttacacgggcttttagcgcttcatctgataactcacttgccgaatagctaaa

SEQ ID NO: 31310 - DNA, 260 bp, Unknown
  Description of Unknown: RightRegion for integrase B5311 sequence
aaaaaaagaacttcaaggtttaatatcaaaatctatccaaggttaataaaaaataaataaattataactgttatcataaaaccgataaccaattcaacgttatgagtggtgcatttgctggaggtgaaggagattacgttgcgttatttgaaccttctgctttagaacttgaaaaacaaggtaaaggatacgtagtagcttctattggtgaagaatccggtttaataccatacactgcttactcagctcccttaaactat

SEQ ID NO: 31311 - DNA, 260 bp, Unknown
  Description of Unknown: RightRegion for integrase B5312 sequence
gcgatagaatttgaactcatcaatggtatgaaactttcggaggaacggacggaaaaatgaaaaagcgatatctgccatttggctaccaaatcacagacggaaaaacaactatagttcaagaagaagccgaagctgtgcaatatatttttgaggaatacacagcagggaagtccctccggaagattgcagagaacatgacagcgaggaaaactccatatcatgaagattcctcaaaatggaaccagaacatggtgagccgc

SEQ ID NO: 31312 - DNA, 260 bp, Unknown
  Description of Unknown: RightRegion for integrase B5313 sequence
aaaagtaaaaaaggcagcaatgaggattacttcgagttagaaataacactaaatatataattattatgtatagcattgatgtgcatatgaataggttcgttaatgctatacataaaataagctaaggaaaataacttccctagccttattttatactatgaacaacatagcacacaatacaccaataccaaagtatgcaatgcgccctgctacttctaagataattttattcatgcacctacctcctttttaggattata

SEQ ID NO: 31313 - DNA, 260 bp, Unknown
  Description of Unknown: RightRegion for integrase B5314 sequence
ttccgaaatgataatccagccgattttttatctttggacttttatccgatgcttgaataatacaaaacaaaggtatgatcagtgtcttgatgaattacatcattgatcatacctttattatttgctcatttccagccgtcgatcagcgcttttacttccgccgttttcgcgatctggtcattgtggattgcttcccacgcggcgatcatgccgttggtatactccggattgcgcttgtaatcgtcgctggtcttcgcggt

SEQ ID NO: 31314 - DNA, 260 bp, Unknown
  Description of Unknown: RightRegion for integrase B5315 sequence
tccgcccagcaggcgataagtactcttaaatatatggttgatggtgagatttatttttgagtaataatcactttttcaaccgtgctatggtatgaaagtaaagtaactaatatgatattaactatcttgaacgaagcgccctgagctatagttttactataggcactgccactggatgttggcattcttgctctagtagctcaacaatacccaatcacaaaacaattcactgataacaaactttgtgcacgtgcttggtt

SEQ ID NO: 31315 - DNA, 260 bp, Unknown
  Description of Unknown: RightRegion for integrase B5316 sequence
tccgcccagcaggcgataagtactctcaaatatatggttgatggtgaggtttatttttgagtaataatcactttttcaaccgtgctatggtatgaaagtaaagtaactactatgatattaactatcgagcaagaatatccccaggcactcaacagggcgcaggtcaacgtgaatcggtcatgacacgacaccgattttgcggaatcaatgttgcttatgaatacaacatcccgcttagtacatgttcaacacatcagcaa

SEQ ID NO: 31316 - DNA, 260 bp, Unknown
  Description of Unknown: RightRegion for integrase B5317 sequence
tccgcccagcaggcgataagtactctcaaatatatggttgatggtgaggtttatttttgagtaataatcactttttcaaccgtgctatagtaagaaagttaggtaagtacattaaaattatctatcctgaacgaagcgtcctgagctatggttttactatagagactgccaatggatgctggcgttctcgttctagcagttcaacaatacccaatcacaaaacaattcactgataacgaactttgcacactcgcctggtt

SEQ ID NO: 31317 - DNA, 260 bp, Unknown
  Description of Unknown: RightRegion for integrase B5318 sequence
tccgcccagcaggcgataagtgctctcaaatatatggttgatggtgagatttatttctaaataatgatctcggattttaagttatgctatggtgataaagtgcaagacagaattaattatctttgacgaaacttaatgggtaattactttgtttgctcccacaagcgagttttgtacggctgtattggggtagtaaatgagctatacaatcttaatcatttgttaggtgagaactcttggtcgcagattcaaatactgaa

SEQ ID NO: 31318 - DNA, 260 bp, Unknown; identical to SEQ ID NO: 31317
  Description of Unknown: RightRegion for integrase B5319 sequence

SEQ ID NO: 31319 - DNA, 260 bp, Unknown
  Description of Unknown: RightRegion for integrase B5320 sequence
tccgcccagcaggcgataagtgctctcaaatatatggttgatggtgaggtttatttttgagtaataatcactttttcaaccgtgctatagtaagaaagttaggtaagtacaataaaattatctatcctgaacgaagcgtcctgagctatggttttactatagggactgccaatggatgctggcgttctcgttctagcagttcaacaatccccaatcacaaaacaattcactgataacgaactttgcacactcgcctggtt

SEQ ID NO: 31320 - DNA, 260 bp, Unknown
  Description of Unknown: RightRegion for integrase B5321 sequence
acctgcaaagaagagaagccacagcgcaaagagtacagcgccggcggcagagaagattagactggcagcgtattgtcgagtatcaacagatcatgaggaacaggccagctcatttgagaatcaaaaggaatattacagcaagtatgtagataagcataaagaatatgagctggcaggtatttatgcagatgaaggtattacagcgacaaacacaaagaaacgtgatggatttaaccagatgattgcggattgtgaagaag

SEQ ID NO: 31321 - DNA, 260 bp, Unknown
  Description of Unknown: RightRegion for integrase B5322 sequence
tccgcccagcaggcgataagtactctcaaatatatggttgatggtgaggtttatttttgagtaataatcactttttcaaccgtgctatagtaagaaagttaggtaagtacaataaaattatctatcctgaacgaagcgtcctgagctatggttttactatagggactgccaatggatgctggcgttctcgttctagcagttcaacaatccccaatcacaaaacaattcactgataacgaactttgcacactcgcctggtt

SEQ ID NO: 31322 - DNA, 260 bp, Unknown
  Description of Unknown: RightRegion for integrase B5323 sequence
agtcacattgacgtagatttttatttgaccgaaaatccagaaatgcccgcaaacccttgatttatgcgggtttgcgggcatctatacgcactggcaatttggttgacacaatggggatcctgctccttaggccagcagggctacagccctattgagatccttcgctattactacggtgacagcatctatatcaacacagcggaacagattgccgggatccctgcttcctggccgggctatgacctgacagtgggaagttc

SEQ ID NO: 31323 - DNA, 260 bp, Unknown
  Description of Unknown: RightRegion for integrase B5324 sequence
tctgcccagcaggcgataagtactctcaaatatatggttgatggtgaggtttatttttgagtaataatcactttttcaaccgtgctatagtaagaaagttaggtaagtacaataaaattatctatcctgaacgaagcgtcctgagctatggttttactatagggactgccaatggatgctggcgttctcgttctagcagttcaacaatccccaatcacaaaacaattcactgataacgaactttgcacactcgcctggtt

SEQ ID NO: 31324 - DNA, 260 bp, Unknown
  Description of Unknown: RightRegion for integrase B5325 sequence
tccgcccagcaggcgataagtgctctcaaatatatggttgatggtgagatttatttctaaataatgatctcggattttaagttatgctatggtgataaagtccaagacagaattaattatctttgacgaaacttaatgggtaattactttgtttgctcccacaagcgagttttgtacggctgtattggggtagtaaatgagctatacaatcttaatcatttgttaggtgagaactcttggtcgcagattcaaatactgaa

SEQ ID NO: 31325 - DNA, 260 bp, Unknown
  Description of Unknown: RightRegion for integrase B5326 sequence
gatgatacgaatggtaaatattgtgttccaaaattaaagcttaatattattttatattagtctttaaataagttgtttgtctgctactatttgggcaaacatcaaaaaagtttattatggaaacacagctaaagatgctgataaaattggttttagagatgatttcatctacaactatattgaaggaaaatgccaagatatctccgttttagatttagaacaatttggtagagatatcactataaaatcctttgataact

SEQ ID NO: 31326 - DNA, 260 bp, Unknown
  Description of Unknown: RightRegion for integrase B5327 sequence
aagtgtaaaaaaggcagcaatgaggattactttgagttagaaataacactaaatatataattattatgtatagcatcgatgtgcatatgaattagctcgttaatgctatacataaaataagctagagaatataatttccctagccttttttacgtgttatttccttacatcattattaatatagcacttgctactccaattcctaagtatgcaatacgccctgtaacttccagcattaattttttcatagtcattacctc

SEQ ID NO: 31327 - DNA, 143 bp, Unknown
  Description of Unknown: RightRegion for integrase B5328 sequence
aaaagtaaaaaaggcagcaatgaggattactttgagttagaaataacactaaatatataattattatgtatagcattgatgtgcatatgaataggttcgttaatgctatacataaaataagctaaggaaaataacttccctag

SEQ ID NO: 31328 - DNA, 260 bp, Unknown
  Description of Unknown: RightRegion for integrase B5329 sequence
gatgatacgaatggtaaatattgtgttccaaaattaaagcttaatattattttatattagtctttaaataagttgtttgtctgctactatttgggcaaacattaaaaaagtttattatggaaacacagctaaagatgctgataaaattggttttagagatgatttcatctacaactatattgaaggaaaatgccaagatatctccgttttagatttagaacaatttggtagagatatcactataaaatcctttgataact

SEQ ID NO: 31329 - DNA, 260 bp, Unknown
  Description of Unknown: RightRegion for integrase B5330 sequence
aagtgtaaaaaaggtagtggtgaggattattttgaattagaaattacactaaatatataattattatgtatagcattgatgtgcatatgaataagttcgttgatgctatacataataatagctagagaattatttttccctagctatttattatttattatctggaatgtattccattatatctccaggttgacaatctaattctctacatatagattctattacttttaaagatacatactcatttttagaaattttcg

SEQ ID NO: 31330 - DNA, 260 bp, Unknown; identical to SEQ ID NO: 31319
  Description of Unknown: RightRegion for integrase B5331 sequence

SEQ ID NO: 31331 - DNA, 260 bp, Unknown
  Description of Unknown: RightRegion for integrase B5332 sequence
aaaagtaaaaaaggcagcaatgaggattactttgagttagaaataacactaaatatataattattatgtatagcatcgatgtgcatatgaattagctcgttaatgctatacataaaataagctagagaatataatttccctagccttttttacgtgttatttccttacatcattattaatatagcacttgctactccaattcctagatatgcaatacgccctgtaacttccagtattatttttttcatagtcattacctc

SEQ ID NO: 31332 - DNA, 260 bp, Unknown; identical to SEQ ID NO: 31322
  Description of Unknown: RightRegion for integrase B5333 sequence

SEQ ID NO: 31333 - DNA, 260 bp, Unknown
  Description of Unknown: RightRegion for integrase B5334 sequence
tccgcccagcaggcgataagtactctcaaatatatggttgatggtgaggtttatttttgagtaataatcactttttcaaccgtgctataataagaaagttaggtaagtacaataaaattatctatcctgaacgaagcgtcctgagctatggttttactatagagactgccaatggatgctggcgttctcgttctagcagttcaacaatacccaatcacaaaacaattcactgataacgaactttgcacactcgcctggtt

SEQ ID NO: 31334 - DNA, 260 bp, Unknown
  Description of Unknown: RightRegion for integrase B5335 sequence
aagtgtaaaaaaggtagtggtgaggattattttgaattagaaattacactaaatatataattattatgtatagcattgatgtgcatatgaataagttcgttgatgctatacataataatagctagagaatataatttccctagctatttttattacatcattattaatatagcacttactactccaattcctaagtatgcaatgcgccctgtaacttccaatactaattttctcatagtcattacctccttcattaggat

SEQ ID NO: 31335 - DNA, 260 bp, Unknown
  Description of Unknown: RightRegion for integrase B5336 sequence
tccgcccagcaggcgataagtactctcaaatatatggttgatggtgaggtttatttttgagtaataatcactttttcaaccgtgctatagtaagaaagttaggtaagtacaataaaattatctatcctgaacgaagcgtcctgagctatggttttactatagggactgccaatggatgctggcgttctcgttctagcagttcaacaatacccaatcacaaaacaattcactgataacaaactttgtgcacgtgcttggtt

SEQ ID NO: 31336 - DNA, 260 bp, Unknown
  Description of Unknown: RightRegion for integrase B5337 sequence
aagtgtaaaaaaggtagtcgtgaggattattttgaattagaaataacactaaatatataattattatgtatagcattgatgtgcatatgaattagctcgttaatgctatacataaaataagctagagaatataatttccctagccttttttacgtgttatttccttacatcattattaatatagcacttgctactccaattcctagatatgcaatgcgccctgttatctccagcattatttttttcatagtcattacctc

SEQ ID NO: 31337 - DNA, 260 bp, Unknown
  Description of Unknown: RightRegion for integrase B5338 sequence
tccgcccagcaggcgataagtactctcaaatatatggttgatggtgaggtttatttttgagtaataatcactttttcaaccgtgctatagtaagaaagttaggtaagtacaataaaattatctatcctgaacgaagcgtcctgagctatgattttactatagggactgccaatggatgctggcgttctcgttctagcagttcaacaatccccaatcacaaaacaattcactgataacgaactttgcacactcgcctggtt

SEQ ID NO: 31338 - DNA, 260 bp, Unknown
  Description of Unknown: RightRegion for integrase B5339 sequence
ttccgaaatgataatccagccgattttttatctttggactttttcccggtgcttgaataacgtaaaataaaggtatgatcagtgtcttgatgaattacatcattgatcatacctttattatttgcttatttccagccgtcgattagcgcttttacttccgccgttttcgcgatctggtcattgtggatcgcttcccacgcggcgatcatgccgttggtatactccggattgcgcttgtaatcgtcgctggtcttcgcggc

SEQ ID NO: 31339 - DNA, 260 bp, Unknown
  Description of Unknown: RightRegion for integrase B5340 sequence
tccgcccagcaggtgataagtactctcaaatatatggttgatggtgaggtttatttttgagtaataatcactttttcaaccgtgctatagtaagaaagttaggtaagtacaataaaattatctatcctgaacgaagcgtcctgagctatggttttactatagggactgccaatggatgctggcgttctcgttctagcagttcaacaatccccaatcacaaaacaattcactgataacgaactttgcacactcgcctggtt

SEQ ID NO: 31340 - DNA, 260 bp, Unknown
  Description of Unknown: RightRegion for integrase B5341 sequence
agtcgctggaagaacgacgcgatgaaagagttcaagttagaaatccatatgaaggtttaatttttattatatctattatagacatcctatatgaacagacgaacttgctcatgttgaaattattagtactcttttctatcaacttacaaatggtctaacacctcaagaaattaaagagggtggactagatgcttattttactgatcacactttaggaatttatccaacaaacagtgcaggtattccttttagtgcagata

SEQ ID NO: 31341 - DNA, 260 bp, Unknown
  Description of Unknown: RightRegion for integrase B5342 sequence
tcaaggttctgcgacatctgcaccgcaccccaacggtcaaatgctatctctttgatatgaaatttctgtcctagctcatcgatgaagttttcgataaaaccatagtgaaccacatttccctcagttgttttcagatagccttgccgttcccatatatcatagggaacgtggtcacggcgaactcttaaaggcaatgtttcttccggcagccagaagtatggcaaaatgtaataatgctcatcatcttcagtgggtggaaa

SEQ ID NO: 31342 - DNA, 260 bp, Unknown; identical to SEQ ID NO: 31322
  Description of Unknown: RightRegion for integrase B5343 sequence

SEQ ID NO: 31343 - DNA, 260 bp, Unknown
  Description of Unknown: RightRegion for integrase B5344 sequence
gataatacgaatggtaaatattgtgttccgaaaataaagcttaatattgttttatattagtctttaaataggttgtttatctgctactatttgggcaaacatcaaaaaagtttattatggaaacacagctaaagatgctgataaaattggttttagagatgatttcatctacaactatattgaaggaaaatgccaagatatctccgttttagatttagaacaatttggtagagatatcactataaaatcctttgataact

SEQ ID NO: 31344 - DNA, 260 bp, Unknown
  Description of Unknown: RightRegion for integrase B5345 sequence
aactttcaaaaactttttatgggaaaaagaacaaccgtgttccgtattttgagacgctaacagcaattttgaaaacaattctacttgaaatagaaaaatcatcgcctttaactaagcatatgccgaacagatgtggtgtcgttaagaatgcgtctcgtagatctatattggcccgtagctcagatggtagagcgtctgactgttaatcagatggtcgcaggttcgagtcctgccgggtcagccatattgcggggtgtagc

SEQ ID NO: 31345 - DNA, 260 bp, Unknown
  Description of Unknown: RightRegion for integrase B5346 sequence
agtcaacatgagctggaatttcatttgataggcggattaaagtttgaagaaaaaatatagccaaactgccttgcaagtcaaatcgcaaggcagttttttgttgctgttggtaatagcttttgagaagaaaatgtggtattgttgtaggtcgaaaggaggcgagatcatggctaaaaacagaacgataccgttcggatactgtatgaaaaacggtgagataacaaccgagccaaaagaagtttacgccgttgttaaaatat

SEQ ID NO: 31346 - DNA, 260 bp, Unknown
  Description of Unknown: RightRegion for integrase B5347 sequence
tccgcccagcaggcgataagtgctctcaaatatatggttgatggtgaggtttatttttgagtaataatcactttttcaaccgtgctatggtatgaaagtaaagtaactactatgatattaactatcgagcaagaatatccccaggcactcaacagggcgcaggtcaacgtgaatcggtcatgacacgacaccgattttgcggaatcaatgttgcttatgaatacaacatcccgcttagtacatgttcaacacatcagcaa

SEQ ID NO: 31347 - DNA, 260 bp, Unknown
  Description of Unknown: RightRegion for integrase B5348 sequence
gaagaggatgccgacctctcggggtgttcgtataagctcccctcaaacccaccaacgtaaaagttgacaattgaaagttgacaattgaaagtgataaaagatggacaatattattgaaagtaaaagctttgattttgcaattcgaattgtcaacctgtataagtacctgactgacggaaagaaagaaaatattctttcaaagcagttgcttcacagtggaacaagcatcggtgcaaatgttgccgaagccgagcaagcac

SEQ ID NO: 31348 - DNA, 260 bp, Unknown
  Description of Unknown: RightRegion for integrase B5349 sequence
aaaagtaaaaaaggcagcaatgaggattactttgagttagaaataacactaaatatataattattatgtatagcattgatgtgcatatgaattagttcgttaatgctatacataaaataagctagagaatataatttccctagccttttttatgtgttatttccttacatcattattaatacagcacttgctactccaattcctagatatgcaatacgccctgtaatttccagcattatttttttcatagtcattacctc

SEQ ID NO: 31349 - DNA, 260 bp, Unknown
  Description of Unknown: RightRegion for integrase B5350 sequence
cgctcacttagaaatcaacctaaggacaactttgatttagttataaaactgcgaatttaattatttttataattatcttcgcttacaaagttgacacactgtttcaatagtgttaatatgttgttagcgaataaaaaggctttttaaaaagtctttttatttttagcctacaattactcttttgtataaatattttatgctaaagtgtcatatttcagagttgagcgtaaatctctttaaaaattactggtgaggtgtag

SEQ ID NO: 31350 - DNA, 260 bp, Unknown; identical to SEQ ID NO: 31317
  Description of Unknown: RightRegion for integrase B5351 sequence

SEQ ID NO: 31351 - DNA, 260 bp, Unknown
  Description of Unknown: RightRegion for integrase B5352 sequence
aaaagtaaaaaaggcagcaatgaggattactttgagttagaaataacactaaatatataattattatgtatagcattgatgtgcatatgaattagctcgttaatgctatacataaaataagctagagaatataatttccctagccttttttacgtgttatttccttacatcattattaatatagcacttgctactccaattcctagatatgcaatgcgccctgttatttccagcattaattttttcatagtcattacctc

SEQ ID NO: 31352 - DNA, 260 bp, Unknown
  Description of Unknown: RightRegion for integrase B5353 sequence
tccgcccagcaggcgataagtactcttaaatatatggttgatggtgagatttatttttgagtaataatcactttttcaaccgtgctatggtatgaaagtaaagtgactaatatgatattaactatcttgaacgaagcgccctgagctatagttttactataggcactgccactggatgttggcattcttgctctagtagctcaacaatacccaatcacaaaacaattcactgataacaaactttgtgcacgtgcttggtt

SEQ ID NO: 31353 - DNA, 260 bp, Unknown
  Description of Unknown: RightRegion for integrase B5354 sequence
gacggggaggagttcggatgccgtgcgtctcgctccaccataactggacaccagttttgatacaatgagtatcgaagcgggtgtccagtttctttttgcaaaagtccctatttgcaagggttttcatataccttttaacgaaagcaggctctacggtaaccgagaaatggtcgccgtagagcctttttgcatttttgcctatgtactttttaattataggtcttgagggtgtgcattgggttcagaggaataattaaaag

SEQ ID NO: 31354 - DNA, 260 bp, Unknown
  Description of Unknown: RightRegion for integrase B5355 sequence
atcgcggatggtgtcgttgaaaagttcgtacaccgtgcgtcatgctccaccatggtgtgagcgaagaagtataccacaaaatgctggatagcgatgaaaccgactcaaacaagtcaagcgaagaagtcactttcatcttaacaattacgtataaatgcaacatgcactgtacttactgctatcagcaaaacgataaaaccttggaaaagaaacttatcagtgatgaaactctggataaaattttaagtatcattgcacag

SEQ ID NO: 31355 - DNA, 260 bp, Unknown
  Description of Unknown: RightRegion for integrase B5356 sequence
aagtgtaaaaaaggcagcaatgaggattactttgagttagaaataacactaaatatataattattatgtatagcatcgatgtgcatatgaattagctcatgttgaaataatttcatctatgatttatcaattaactgatggagctactcctgaagaattaaaagctgctggaatggacactaactatgctcaatttggtcatggtattcaaccaacagattcaaatggagttccttttacaactgcttatataaatgtgt

SEQ ID NO: 31356 - DNA, 260 bp, Unknown
  Description of Unknown: RightRegion for integrase B5357 sequence
gatttcgcttccaatgcaccaggtatgaagaatacagatataccctatattagctcctagatactttgcgtcttttgccaattcattcaaggttgctgaggcagcatgatacagtgtatcatacaacagcttctggttgctgtaaatgatggaattcaattcatcaggaactgtgaatactacatgataataaggtgcatcaagtacgttctctttttgtgcatcaatccatttctctttcggaaactcctggcacatgg

SEQ ID NO: 31357 - DNA, 260 bp, Unknown
  Description of Unknown: RightRegion for integrase B5358 sequence
atatttgattctatattatgggatggtaaaaagggctttaacattaaattaaacatataatttttaaaccgagttctaggtggtctgaacatccagcccagtataaattccattaattatttaattttcaagtataaaaatacctattatttccttaatgcatatttgtagaaaacgtgagtcagtatttattactggctcattctttttgcgtaatattattttttaatattgttacgcaaatattacgtttcttgtga

SEQ ID NO: 31358 - DNA, 260 bp, Unknown; identical to SEQ ID NO: 31314
  Description of Unknown: RightRegion for integrase B5359 sequence

SEQ ID NO: 31359 - DNA, 260 bp, Unknown
  Description of Unknown: RightRegion for integrase B5360 sequence
aagtgtaaaaaaggtagtggtgaggattattttgaattagaaattacactaaatatataattattatgtatagcattgatgtgcatatgaataagttcgttgatgctatacataataatagctagagaatataatttccctagctatttttattacatcattattaatacagcacttgctactccaattcctaagtatgcaatgcgccctgctacttctaagataattttattcatacgcctacctcctgtttattaaga

SEQ ID NO: 31360 - DNA, 260 bp, Unknown
  Description of Unknown: RightRegion for integrase B5361 sequence
aaatgtaaaaaaggtagcgatgaggactattttgaactagaaataacactaaatatataattattatttacagcatcaatgagcaaatgaataggctcgttaatgctatacataaaaatagctagagaattaactctagctattatcttgcaagtagtcacttaatattttattaattaaatttgtatattgctagaagtgaaaaaataatataaaatagaaaaaagagaactacattctattggcttttgagtggtttt

SEQ ID NO: 31361 - DNA, 260 bp, Unknown
  Description of Unknown: RightRegion for integrase B5362 sequence
tccgcccagcaggcgataagtactctcaaatatatggttgatggtgaggtttatttttgagtaataatcactttttcaaccgtactatagtaagaaagttaggtaagtacaataaaattatctatcctgaacgaagcgtcctgagctatggttttactatagggactgccaatggatgctggcgttctcgttctagcagttcaacaatacccaatcacaaaacaattcactgataacaaactttgtgcacgtgcttggtt

SEQ ID NO: 31362 - DNA, 260 bp, Unknown
  Description of Unknown: RightRegion for integrase B5363 sequence
agtcacattgacgtagatttttatttggccgaaaatccaggaatgcccgcaaacctttgatttatgcgggtttgctggcatctatacgcactagcaatttggttgacacaatggggatcctgctccttaggccagcagggctacagccctattgagatccttcgctattactacggtgacagcatctatatcaacacagcggaacagattgccgggatccctgcttcctggccgggctatgacctgacagtgggaagttc

SEQ ID NO: 31363 - DNA, 260 bp, Unknown; identical to SEQ ID NO: 31317
  Description of Unknown: RightRegion for integrase B5364 sequence

SEQ ID NO: 31364 - DNA, 260 bp, Unknown
  Description of Unknown: RightRegion for integrase B5365 sequence
agtcacattgacgtagatttttatttagctgaaaatccagaaatgccagcaaacccttgatttatgcgggtttgctggcatctatacgtactagcaatttggatgacacaatggggatcctgctccttaggccagcagggctacagccctattgagatccttcgctattactacggtgacagcatctatatcaacacagcggaacagattgccgggatccctgcttcctggccgggctatgacctgacagtgggaagttc

SEQ ID NO: 31365 - DNA, 260 bp, Unknown
  Description of Unknown: RightRegion for integrase B5366 sequence
gaagctgcgggcgggtgttcggctcagctcccgccatctccaccacgaaagtcaggttaaaataaatgcaggtttgcatttgctttaacctgacttttttgttatactgcaatcaaggttatttatataatatacggaatacagagcaatcatttaaaattctagaggaagaacagtgtttagagagatattaacagaattaattaaagataacgaatgggcaaagttgcaaaaaccgtgtgatgagagtgaacttgcta

SEQ ID NO: 31366 - DNA, 260 bp, Unknown
  Description of Unknown: RightRegion for integrase B5367 sequence
ttccgaaatgataatccagccgattttttgtctttggactttttcccggtgcttgaataatgcaaaacaaaggtatgatcagtgtcttgatgaattacatcattgatcatacctttattattcgcttacttccagccgtcgatcagcgcttttacttccgccgttttcgcgatctgatcgttgtggatcgcttcccatgcggcgatcatgccgttggtatactccggattgcgcttgtaatcgtcgctggtcttcgcggt

SEQ ID NO: 31367 - DNA, 109 bp, Unknown
  Description of Unknown: RightRegion for integrase B5368 sequence
gatttcacgggcaatgcacctgccttacagctcgtacagctcggtgtatttcttctttaaataatcggtgaagtggtgcgggtcgaacttgccgccgcagaggctctcg

SEQ ID NO: 31368 - DNA, 260 bp, Unknown
  Description of Unknown: RightRegion for integrase B5369 sequence
aaaagtaaaaaaggtagcaatgaggactattttgaattagaaataacactaaatatataattattatgtatagcattgatgtgcatatgaataggctcgttgatgctatacataaaataagctagagaatataatttccctagctattttttatttattatctggaatgtattccattatatctccaggttgacaatctagctctttgcatattgtttctataattttcaaagatacatattcatttttagaaatcttag

SEQ ID NO: 31369 - DNA, 260 bp, Unknown; identical to SEQ ID NO: 31319
  Description of Unknown: RightRegion for integrase B5370 sequence

SEQ ID NO: 31370 - DNA, 260 bp, Unknown; identical to SEQ ID NO: 31317
  Description of Unknown: RightRegion for integrase B5371 sequence

SEQ ID NO: 31371 - DNA, 260 bp, Unknown
  Description of Unknown: RightRegion for integrase B5372 sequence
ttccgaaatgataatccagccgattttttatctttggactttttcccggtgcttgaataatgcaaaacaaaggtatgatcagtgtcttgatgaattacatcattgatcatacctttattatttgctcatttccagccgtcgatcagcgcttttacttccgccgttttcgcgatctggtcattgtggattgcttcccacgcggcgatcatgccgttggtatactccggattgcgcttgtaatcgtcgctggtcttcgcggt

SEQ ID NO: 31372 - DNA, 260 bp, Unknown
  Description of Unknown: RightRegion for integrase B5373 sequence
tccgcccagcaggcgataagtgctctcaaatatatggttgatggtgagatttatttctaaataatgatctcggattttaagttatgctatggtgataaagtgcaagacagaattaattatctttgacgaaacttaatgggtaattactttgtttgctcccacaagcgagttttgtacggctgtattggggtagtaaatgagctatacaatcttaatcatttgtcaggtgagaactcttggtcgcagattcaaatactgaa

SEQ ID NO: 31373 - DNA, 260 bp, Unknown
  Description of Unknown: RightRegion for integrase B5374 sequence
gcaacaccaaatcatggcgatgattctaagaatataaagcttgaaataatacttaaataattttttacctaacatacacaccatcgtgtgactgattcataagtaccacggtggtgtgtatattttatttcttaactatgattcagcttttcctctccttatttaatatatgcaacattatacataaaaagatagcttttacactatctttatttaaacacctttcttgtttcatcatcgtttaaatcacaatccacgtt

SEQ ID NO: 31374 - DNA, 260 bp, Unknown
  Description of Unknown: RightRegion for integrase B5375 sequence
gatgatacgaatggtaaatattgtgttccaaaattaaagcttaatattattttatattagtctttaaataagttgtttgtctgctactatttgggcaaatatcaaaaaagtttattatggaaacacagctaaagatgctgataaaattggttttagagatgatttcatctacaactatattgaaggaaaatgccaagatatctccgttttagatttagaacagtttggtagagatatcactataaaatcctttgataact

SEQ ID NO: 31375 - DNA, 260 bp, Unknown
  Description of Unknown: RightRegion for integrase B5376 sequence
aagtgtaaaaaaggcagcaatgaggattactttgagttagaaattacactaaatatataattattatgtatagcattgatgtgcatatgaattagctcgttaatgctataaataaaataagctagagaatataatttccctagctattttttatttattatttccctacatcattatcaatatagcacttgctactccaattcctagatatgcaatgcgccctgttatctccagcattatttttttcatagtcattacct

SEQ ID NO: 31376 - DNA, 260 bp, Unknown
  Description of Unknown: RightRegion for integrase B5377 sequence
gatcagcatgagctggagtttcatttgatcggcggattgaaattcaaagaaaacatataacagaaaatgccttgcagtaaaattgcagggcatatttttgttggttttggtactggatttccacagaattttgtagtattgttgtacacggaggtgaaattagatggcaagaaacagagtaatcccgttcggctactgcatgaaaaacggcgaaataacgaccgaaccaaaagaagtttatgcagttgcagagattttca

SEQ ID NO: 31377 - DNA, 109 bp, Unknown
  Description of Unknown: RightRegion for integrase B5378 sequence
acgagcggtgaagtgttcggacgctgtgcgcaaagtcctgccaaaagaccgtcagtgtaaagctgacggtctttttgtatttatatatcgaaaaatctccggcaagcaa

SEQ ID NO: 31378 - DNA, 260 bp, Unknown
  Description of Unknown: RightRegion for integrase B5379 sequence
agcgttagaggaaaaggacatgaagaagaatttgaattacaaattaacattaaattataaaaattatcgtgtgggtaccaattcttcagtaccaatatcagttaaaagcgcctttcctctattatctggcattgtatatctttgatttaaataacgaagtgctgctcctagttctccgccaaagccaccatattgagtaactaattgtttagcaaaagctaaattctttttcttaattgaaacaggatactgtaatcttt

SEQ ID NO: 31379 - DNA, 260 bp, Unknown
  Description of Unknown: RightRegion for integrase B5380 sequence
caacgtgggacggatgatgtacagattaagatttaccctgtgttgtcatcgtgtaagtgatgactgagctatccatacacgttgtcaacgcctgccaagtagacatgacttgatgtcccaccctttgtttctcctgtccataaaagtatgataactgacgccgtagtgttgtgccatctctctgtaagacttatattcattaccaaggtgatctacaaccacacgcttaactagtgcaatctcaagactgtcaccgtttt

SEQ ID NO: 31380 - DNA, 260 bp, Unknown
  Description of Unknown: RightRegion for integrase B5381 sequence
agcgttagaggaaaaggacatgaagaagaatttgaattacaaattaacattaaattataaaaattatcgtgtgggtaccaattcttcagtaccaatatcagttaaaagagcctttcctctattatctggcattgtatatctttgatttaaataacgaagtgctgctcctagttctccgccaaaaccaccatattgagtaactaattgtttagcaaaagctaaattctttttcttaattgaaataggatactgtaatcttt

SEQ ID NO: 31381 - DNA, 260 bp, Unknown
  Description of Unknown: RightRegion for integrase B5382 sequence
cagtcgctttctgaggtcactgagaggggtttaatagatgttgatgaggttatcatatagttgagattctatcgtcagtagcgcttgttggggttcacagaaagcttcttcaaagtactacctgtaccagcattactaagcacctttgaagcttgctcattagcggcatctgagaaggtgctttttccattctcaactttgacacttttaccacaattgatacgggcttgaagttgctcattagtgagttcactcgtaga

SEQ ID NO: 31382 - DNA, 260 bp, Unknown
  Description of Unknown: RightRegion for integrase B5383 sequence
ataataaacgaaattcatttacttgataatagtaaattcaagataaaattcaatctataataggcataaatttaaactgggcaggatgttctatccagtttaaatttatgctaataaataaaactgattatctacataactttttataaggaacaatggaaacagaatttctctatatattatattacgtgtattaggcgtataggcgtatatacgtatatgcctaattatacaaatattacttataaataaatttttgt

SEQ ID NO: 31383 - DNA, 260 bp, Unknown
  Description of Unknown: RightRegion for integrase B5384 sequence
cagtcgctttctgaagtcactgagagggggttgatagatgttgatgaggttatcatatagttgagattctatcgtcagaatcgcttgttaggattcacagaaaatttcttcaaagtactacctgtaccagcattattaagcacctttgaagcttgcgcattagcggcatctgagaaggtgctttttccattctcaactttgacacttttaccacaattgatacgggcttgaagttgctcattagtgagttcactcgtaga

SEQ ID NO: 31384 - DNA, 260 bp, Unknown
  Description of Unknown: RightRegion for integrase B5385 sequence
ctccgtcttgaccgtgatactcccccctccctcacactttacctgaactgggaggattgatttttttggggaatgtaatatagtaaatcggacttatgaataagtacgattaactatattttcacttttccccaagtattccactgaactccaaccctctgcaccggtgccgatgagcgggcacaggcatccgctcccgcctatgggagaataagcgatgtcgtttcagtttctcttttccctgcgtatctaccaggcca

SEQ ID NO: 31385 - DNA, 109 bp, Unknown
  Description of Unknown: RightRegion for integrase B5386 sequence
gaaagaatgtgctaccgtaagcagacctctgacttggcgttgcacgttgaatttttgtaactatttatgtacaagtgagatataatgtctttttttcatagatccacat

SEQ ID NO: 31386 - DNA, 260 bp, Unknown
  Description of Unknown: RightRegion for integrase B5387 sequence
ataataaccgaaattgatttacttgataatggtaaattcaagataaaattcaatctataatagacataaatttaaactgggcaggatgtgcagctgctattagtgcaaaaaaagcaggagcagaagttcatatatatgaaaaaacagatttattacttggacttggaaatgttggcggcataatgagaaataacggaagatatactgcatctgaagaacttattgctttaggtggcggagatttaatcaatattaccgat

SEQ ID NO: 31387 - DNA, 260 bp, Unknown
  Description of Unknown: RightRegion for integrase B5388 sequence
cagtcgctttctgaagtcactgagaggggtttaatagatgttgatgaggttatcatatagttgagattctatcgtcagtatcgcttgttaggattaacagaatacttcttcaaagtactacctgtaccagcattattaagcacctttgaagcttgcgcattagcggcatctgagaaggtgctttttccattcttaattttgacacttttaccacaattgatacgggcttgaagttgctcattagtgagttcactcgtaga

SEQ ID NO: 31388 - DNA, 90 bp, Unknown
  Description of Unknown: RightRegion for integrase B5389 sequence
ggaaacctatataacaacaactttaccgtagatatatttccatcgttgcctcagatctaatacttatatcacaaatggttgtatgtatat

SEQ ID NO: 31389 - DNA, 260 bp, Unknown
  Description of Unknown: RightRegion for integrase B5390 sequence
caggagaagtgttcggataaattgctatcatctccaccaagatatgataaatccgcataagcaagctgtttatgcggatttatttttgtttatccccgaaaaatccccgaattattcaagcttcaatataatttcatcaagtacagcgacagctctttcctcctcacgaggatacaaatgtgaatatgtattccaagtcatttcaacatcagaatgaccaagccttctggcaacttcttgaatgttaattccctcgttcg

SEQ ID NO: 31390 - DNA, 79 bp, Unknown
  Description of Unknown: RightRegion for integrase B5391 sequence
aggtattggacgaacacttatttcttcagcggcggcttcgccgtaaagtgttcgctctgatccacaacagaaaagcgcc

SEQ ID NO: 31391 - DNA, 260 bp, Unknown
  Description of Unknown: RightRegion for integrase B5392 sequence
tcggatttcgcttccaatgcaccggcaaggaagtcccgaaaaacgttggtgcataattgaagcaaccaagcctttcccaataataggtctgatttttctcatcaaaggctgcatactcccgtatctgctctgctgttacaggaagatactccataatcagactttcgaactcttccttcggaatgccatttggataatcttcagaattgaacttttcaccatatttcattccatacaggtgttcaaacattccgttataa

SEQ ID NO: 31392 - DNA, 94 bp, Unknown
  Description of Unknown: RightRegion for integrase B5393 sequence
aaagaagtaagtgttcgtattatgaacgattggtggagacaagcgggatcgaaccgctgacctcttgaatgccattcaagcgctctcccagctg

SEQ ID NO: 31393 - DNA, 260 bp, Unknown
  Description of Unknown: RightRegion for integrase B5394 sequence
aggtattggacgaacacctatttctttagcggaggcttcgccgtgaagtgttcgctctgatccacaacagaaaagcgccgtcttgggaagaatcccaagacggcgcttttttatatttctgaagcgttctaaaacttcacaacagggttattttggaatatgtttatcaacggaatgctaccgttttcggctttttatgatataatatgaatacaccataaaatcaagaagggataacaatgccaatgtatttgaagcgc

SEQ ID NO: 31394 - DNA, 260 bp, Unknown
  Description of Unknown: RightRegion for integrase B5395 sequence
cagtcgctttctgaagtcactgagaggggtttaatagatgttgatgaggttatcatatagttgagattctatcgtcagtatcgcttgttaggattaacagaatacttcttcaaagtactacctgtaccagcattattaagcacctttgaagcttgctcattagcggcatctgagaaggtgctttttccgttcttaactctgacatttttaccacaattgatacgggcttgaagttgctcattagtaagttcactcgtaga

SEQ ID NO: 31395 - DNA, 73 bp, Unknown
  Description of Unknown: RightRegion for integrase B5396 sequence
aagagttcttatttgaacaaaatggtgatccacccgggattcgaacccgggacaccctgattaaaagtcaggt

SEQ ID NO: 31396 - DNA, 260 bp, Unknown; identical to SEQ ID NO: 31378
  Description of Unknown: RightRegion for integrase B5397 sequence

SEQ ID NO: 31397 - DNA, 73 bp, Unknown
  Description of Unknown: RightRegion for integrase B5398 sequence
ttcgacgagggactcgtcagctccaccataacgcgcaaagacgaactctttatattgtgaagaacgtctttgc

SEQ ID NO: 31398 - DNA, 260 bp, Unknown
  Description of Unknown: RightRegion for integrase B5399 sequence
tttaaaccgcattgtatagccaaaaatggcttaacagtgcggtttttctttatcctgtaactgcatgagactacatgagaaagcatgatttttgacacagaaaatacacagtaattacacaggaagaaattaccaattttaaaggcgtttactataataaagcggccccgtatcgctacggagccgcccggatattataccctctttggataggctattcagtttgtttactcataatgcagcgcctttgcccggctgcg

SEQ ID NO: 31399 - DNA, 260 bp, Unknown
  Description of Unknown: RightRegion for integrase B5400 sequence
cagtcgctttctgaagtcactgagaggggtttaatagatgttgatgaggttatcatatagttgagattctatcgtcagtatcgcttgttaggatttacagaaaatttcttcaaagtactacctgtaccagcattactaagcactttcgaagcttgctcattagcggcatctgagaaggtgctttttccgttctcaactttgacacttctaccacaattgatacgggcttgaagttgctcattagtgagttcactcgtaga

SEQ ID NO: 31400 - DNA, 260 bp, Unknown
  Description of Unknown: RightRegion for integrase B5401 sequence
tctataattgacagtgtttacattacagaaaacgatattaaagttatatttaaagagtaagtagttttacctcactaaaacaattatcaactattgacaatcactgttttttctgttaatgtaaaagctaacggagtttaatttagaacttctacactattttatacataaagaatactcgtaaagtgtaaatcagagaataccaccaaacctatggtagtattctctattttatcggaggaaattgatatgattcgcac

SEQ ID NO: 31401 - DNA, 260 bp, Unknown
  Description of Unknown: RightRegion for integrase B5402 sequence
cagtcggatttcaacctcaatgcaccaaaatcaattcccgataattttctatctctgtgacagacatcgcatctcttcctttccgttccggcggtcttgccgccgctgtttcccggaagggaatggaatcggtacttgatccataagtaattgatttttctgtatttgatttctctatatttaattctgcgggcttttccgtatccggttttaccatatccgggttttccgtatctggtgaaaccacatctgacggcagc

SEQ ID NO: 31402 - DNA, 260 bp, Unknown
  Description of Unknown: RightRegion for integrase B5403 sequence
cagtcgctttctgaagtcactgagaggggtttaatagatgttgatgtagtagagatttagtattttttgtgagggttcactgagtactttttaagctttgaagctacccgaccagcgttactattagcattggtgacgttggttttttcagcttctgttaagtctgaatagtccagcttccaagccttattacacttaatctgagcatcgagaatatcatttctgatagctggagcgtaaccggatacatcgctaatact

SEQ ID NO: 31403 - DNA, 260 bp, Unknown
  Description of Unknown: RightRegion for integrase B5404 sequence
gaaaaaggaattagaaatggtaaatttgaacttgatataaaattaagattaccaatatagttttttactgttatggtcatactgacaaacaataatccatatgaccataacagttaggaaatatatagtataaatagaataaaatagattaaatgttaaatatgtgttaaatattctataaaaggaatattctacatattaaaaatcatatatttcattaagacttttgaaaattgagaaagttgagatgaaataattta

SEQ ID NO: 31404 - DNA, 109 bp, Unknown
  Description of Unknown: RightRegion for integrase B5405 sequence
ggacgttgggatcctgatgcgataaagcaatttaagttagaaatatatttaaaggtgtaataagtcacattataacctacatcatttatgggctaattcttcagtacca

SEQ ID NO: 31405 - DNA, 260 bp, Unknown
  Description of Unknown: RightRegion for integrase B5406 sequence
atgtcagcgcacggttcggattgtctattgtatggggagccactgttaaatgttccttgaactgttgttcgaggaactttttttgccttttttagcccgccatatgtgtcgccatatgtataaggggaggggaatgtatatgtgcggtatgatactggctgctatttgggtgcttgttgtctctacattactctcgcttgtgctgtttactttgggcagcagtgttcatatacgctctggaggcggcggacttttgccgt

SEQ ID NO: 31406 - DNA, 109 bp, Unknown; identical to SEQ ID NO: 31404
  Description of Unknown: RightRegion for integrase B5407 sequence

SEQ ID NO: 31407 - DNA, 260 bp, Unknown
  Description of Unknown: RightRegion for integrase B5408 sequence
ctttacactgcacccggagctgtgatcctgtcatgcagcaggtcagcggctagcttttaaagcccagaccagagctctctcgtactctgtcagcggcagccccggaactcagcaaagcagataattatattttagtacatgctgaaatacttcgccaccttgtgcgccggcgcatccggatcgcagatgaagtcatgcgccagatcgaagtagaagtctggcgtgtctacctggtacttttccaccgtcctccgtgagtc

SEQ ID NO: 31408 - DNA, 71 bp, Unknown
  Description of Unknown: RightRegion for integrase B5409 sequence
tcgcatttcagcgtattggtgggcccacctgggatcgaaccagggaccgaccggttatgagccggttgctc

SEQ ID NO: 31409 - DNA, 260 bp, Unknown
  Description of Unknown: RightRegion for integrase B5410 sequence
gacaacggaacgaggtgggggaagaaccagtacagactggatatttttttgaaaaattgattaccatgatattggaacatacgaatctgttccatgatgatagttatatattgacttcaacagaaaaaccaccggcaagcggtggttttttctgtgaagtgtgtgtgtatactcgtacgaaagataggatttctacattattattatacctctgatgtttttatgcgtcaagaaaatactttgctactttgtatttcttt

SEQ ID NO: 31410 - DNA, 260 bp, Unknown
  Description of Unknown: RightRegion for integrase B5411 sequence
gataaatccaaaggatgcaaatctaaattatccttaaaaattgtttttgtttttaaataaaaaagagatgtacttttaatgttttatcatcaaaagtacatcttctttaagtttattctttattgtctaatcctattttagatagtatataaaatgtgatacttagaatcatgccacagacaacagcaaggcccataccttttaattgtacaggaccaatatttacagcagctccactaagaccacttatcatagttacg

SEQ ID NO: 31411 - DNA, 260 bp, Unknown
  Description of Unknown: RightRegion for integrase B5412 sequence
tttgaagacggggaggagttcggatgccgtgcgtctcgctccaccataagtccaccgtaattctgatagaattacggtgggctttttctatgcccgaaaaccgcttgaaatagggcttttcggctgttcaggctcataaacgaaccccgctgcagagtaattatgcggcggggaatcgtgcgttttaggaggattgcagctttctgctctgccgtaatcgttaaacagccgagtattcgttgaactgctgagggtaatcg

SEQ ID NO: 31412 - DNA, 109 bp, Unknown; identical to SEQ ID NO: 31404
  Description of Unknown: RightRegion for integrase B5413 sequence

SEQ ID NO: 31413 - DNA, 260 bp, Unknown
  Description of Unknown: RightRegion for integrase B5414 sequence
atgtcagcgcacggttcggattgtctattgtatggggagccactgttaaatgttccttgaactgttgtttgaggaactttttttgcccgccatatgtgtaaggggaggggaatgtatatgtacacgggatgatgctggctgccactcatccccctcgccgcttacagtttacttcggttaaaagtgtttatatacgttctggagcggcaagtctcttctgttcgccgccggataaggcggcgccattttcgaaatcatta

SEQ ID NO: 31414 - DNA, 260 bp, Unknown
  Description of Unknown: RightRegion for integrase B5415 sequence
gacgatggtactcgtttcggaaaacatcaatacaggttagatatttttttgaaagattaacctatatcatttaggcacacacgaacgtgtaccaggatgatataggtggacaaaaaacagaaagcaaggtcattaaccttgctttttcattcttcgaaactattataaatgttggatttttacgaaaaagcgtgccggggttttattcttaaatagcaatctactatagtagaaattaaaaaaattaagaaattcatcat

SEQ ID NO: 31415 - DNA, 260 bp, Unknown
  Description of Unknown: RightRegion for integrase B5416 sequence
acatcaatatttgaaattgctgaaaaagagctactagaaatagacgcttatcaactgtaattttcaggggctatgaagcccctttttatgtctcaataagtgcccttcttgttcggatttacagaaaacttccgtaaagcattacccgacttaagcacctttgaagcttgctcattagctgaggctgtgaaggtgctctcaccatttttaacgctaacgctcttagagcacgttacacgggcttttagcgcttcatctga

SEQ ID NO: 31416 - DNA, 260 bp, Unknown
  Description of Unknown: RightRegion for integrase B5417 sequence
atgtcagcgcacggttcggattgtctattgtatggggagccactgttaaatgttccttgaactgttgttcgaggaacttttttgccttttttagcccgccatatgtgtcgccatatgtataaggggaggggaatgtatatgtacacgggatgatgctggctgccactcattcccctcgctgcttacagtttacttcggttaaaagtgtttatatacgttctggagcggcaagtctcttctgttcgacaccggataaggcg

SEQ ID NO: 31417 - DNA, 109 bp, Unknown
  Description of Unknown: RightRegion for integrase B5418 sequence
gataaatccaaagaatgcaaatctaaattatccttaaaaattgtttttgttttcaaataaaaaagagatgtacttttaatgttttatcatcaaaagtacatcttcttta

SEQ ID NO: 31418 - DNA, 260 bp, Unknown
  Description of Unknown: RightRegion for integrase B5419 sequence
ggacgttgggatcctgatgcgataaagcaatttaagttagaaatatatttaaaggtgtaataagtcactttataacctacatcatttatgggctaattcttcagtaccaatatctgtcaataacgcttgaatttctggatatggcattgtatagcgttgagataaatatctaagtgccgctccaagctctccatcaggtccgcctaattggtcaataataactgccgctgcttttgcattcggtttagtaatgtttatag

SEQ ID NO: 31419 - DNA, 260 bp, Unknown
  Description of Unknown: RightRegion for integrase B5420 sequence
agaaagcctatcttagaactggctaaaataggctcttgtcaaatatggcaggggcagtaagattcgaactcacgacactcggttttggagaccgatgccaacacacactaatatactgtttttactttatattttatcggcattctgactttaaaattttgccattctgacttttgctttgctggcaagaacaaaaaaagaacagataattacctgcacagctccaattcctgccttaatttattcagccgacctatcca

SEQ ID NO: 31420 - DNA, 260 bp, Unknown
  Description of Unknown: RightRegion for integrase B5421 sequence
gacaatggaacgaggtggggaaagaaccagtacagactggatatttttttgaaaaattgattaccatgatattggaacatacgaatctgttccataatgatagttatatattgacttcaacagaaaaaccaccaacaagcggtggttttttctgtgaagtgtgtgtatacgtgaaaagcacgtgttttatatacctattatatagcagattcgtttatgcgtcaagaaaatacttcgctactttgtatttcttcccatca

SEQ ID NO: 31421 - DNA, 260 bp, Unknown
  Description of Unknown: RightRegion for integrase B5422 sequence
cgcagggaactgtgcagacagtttgttgagaaaattgatgttttcccagaggaaaggtaagatggcaggattctgaaaaagatcttctttcgttttcctgtttattatgagaatgaagagaaaagggcaggaaatgatgaacctgatgaagtggtgattttcgcagtggattgtacggagcatcgagtgacagcttctgaggcgaaagcgacttatgtggagatacgggcatatgtgaaagaaaagtatgatatgaatat

SEQ ID NO: 31422 - DNA, 260 bp, Unknown
  Description of Unknown: RightRegion for integrase B5423 sequence
tttgaagacggggaggagttcggatgccgtgcgtctcgctccaccataagtccaccgtaattttgatagaattacggtggactttttctatgcccaaaaaccgcttggaatcaggcttttcgaccgtttcagcacataagtgaaccccgccgcagagcgattctgcggcgggggtttgtgcgttttatagggattgcggttttctgctctgctgtaatcgttaaacagccgaataatcgttgaactactgggggtattcg

SEQ ID NO: 31423 - DNA, 109 bp, Unknown
  Description of Unknown: RightRegion for integrase B5424 sequence
gataaatccaaagaatgcaaatctaaattatccttaaaaattgtttttgtttttaaataaaaaagagatgtacttttaatgttttatcatcaaaagtacatcttcttta

SEQ ID NO: 31424 - DNA, 260 bp, Unknown
  Description of Unknown: RightRegion for integrase B5425 sequence
tcaccaatctttgaaattgctgataaagagctactggatattgacgcttatcaactgtaattttcaggggctatgaagcccctttttatgtctcaataagtgcccttcttattcggattcacagaaaacttccgtaaagcattacccgacttaagcacttttgaagcctgctcattagctgaggctgtgaaggtgcttacaccatctttcaccgtgacatttttagagcaattgctacggacccttagcgcttcatcaga

SEQ ID NO: 31425 - DNA, 109 bp, Unknown; identical to SEQ ID NO: 31423
  Description of Unknown: RightRegion for integrase B5426 sequence

SEQ ID NO: 31426 - DNA, 260 bp, Unknown
  Description of Unknown: RightRegion for integrase B5427 sequence
ggacgttgggatcctgatgcgataaagcaatttaagttagaaatatatttaaaggtgtaataagtcatattataacctacatcatttatgggctaattcttcagtaccaatatctgtcaataacgcttgaatttctggatatggcattgtatagcgttgagataaatatctaagtgccgctccaagctctccatcaggtccgcctaattggtcaataataactgccgctgcttttgcattcggtttagtaatgtttatag

SEQ ID NO: 31427 - DNA, 260 bp, Unknown
  Description of Unknown: RightRegion for integrase B5428 sequence
acatcaatctttgaaattgctgataaagagctactagaaatagacgcttatcaactgtaactttcaggggctatgaagcccctttttacgtcttaataagtaccgcgcttattagggttcacactgtacttcttcaaagtgctactaagcgcctttgtagctccagcattagcggagtctgtgaaggtactttcaccattttttaccgtaacattcctagaacaattcagacgggcttttaactgttcgtcggtaagttc

SEQ ID NO: 31428 - DNA, 260 bp, Unknown
  Description of Unknown: RightRegion for integrase B5429 sequence
tcaccaatctttgaaattgctgataaagagctactggatattgacgcttatcaactgtaattttcaggggctatgaagcccctttttatgtctcaataagtgcccttcttattcggattcacagaaaactttcgtaaagcattacccgacttaagcacctttgaagcttgcgcattagctgagtctgtgaaggtactttcaccattcttaacactaacgttcttagaacatgctacacgggcttttaacgctccatctga

SEQ ID NO: 31429 - DNA, 75 bp, Unknown
  Description of Unknown: RightRegion for integrase B5430 sequence
acggagcataaacagcccacaagaaagaaaaagaaaccaaaatccaaagaaacgaggtaaacagctatgagtatt

SEQ ID NO: 31430 - DNA, 260 bp, Unknown
  Description of Unknown: RightRegion for integrase B5431 sequence
gaaagagggaatagaaaaggtaaatttgagttagatattaaattaaagttacctgtataataattcctaactgttattatgaatctgataaacaataatctgtatgactataacagttacccaaatattaatgtaaatagaatttaatagattaaatgttaaaaataagttaaataggaatatttttataatgaaaaatcatacactgtactagtgcattatctaaacgcagtggtttacagctcgctggaaatagtata

SEQ ID NO: 31431 - DNA, 260 bp, Unknown
  Description of Unknown: RightRegion for integrase B5432 sequence
acatcaatatttgaaattgctgaaaaagagctactagaaatagacgcttatcaactgtaattttcaggggctatgaagcccctttttatgtctcaataagtgcccttcttgttcggatttacagaaaacttccgtaaagcattacccgacttaagcacctttgaagcttgctcattagctgaggctgtgaaggtgctctcaccatttttaacactaacgctcttagagcacgttacacgggcttttagcgcttcatctga

SEQ ID NO: 31432 - DNA, 260 bp, Unknown
  Description of Unknown: RightRegion for integrase B5433 sequence
tcaccaatctttgaaattgctgataaagagctactggatattgacgcttatcaactgtaattttcaggggctatgaagcccctttttatgtctcaataagtgcccttcttattcggattcacactaaatttccgtaaagcattacccgacttaagcacttttgaagcctgctcattagcggcatctgagaaggtgctttttccgttctcaactttgacacttctaccacaattgatacgggcttgaagttgctcattagt

SEQ ID NO: 31433 - DNA, 109 bp, Unknown; identical to SEQ ID NO: 31404
  Description of Unknown: RightRegion for integrase B5434 sequence

SEQ ID NO: 31434 - DNA, 76 bp, Unknown
  Description of Unknown: RightRegion for integrase B5435 sequence
aagagttcgaatttgaatggtatggtgatccacccgggattcgaacccgggacaccctgattaaaagtcaggtgct

SEQ ID NO: 31435 - DNA, 260 bp, Unknown
  Description of Unknown: RightRegion for integrase B5436 sequence
tacgatggtactcgtttcgggcaacatcaatacaggttagatatttttttgaaagattaacctgtatcatttaggtactgacgaacgtgtaccagaatgatataggtaaaagacaaactaaaaagcaaggtcagttgccttgctttttcatttttcgaaactattataaaggattcttacataaaagcgtgccggggttttattcttaaatagcaatctactatagtagaaattaaaaaaattaagaaattcatcataca

SEQ ID NO: 31436 - DNA, 260 bp, Unknown
  Description of Unknown: RightRegion for integrase B5437 sequence
acatctatctttgaaattgctgaaaaagagctactagaaatagacgcttatcaactgtagcaatcaggggctatgaagcccctttttatgtctcaataagtgcccttcttgttcggattcacagaaaacttccgtaaagcattacccgacttgagtacctttgcagcacctgaattagctgagtctgtgaaggtgcttacaccatctttcaccgtgacatttttagagcaattactacgggcttttaatgcttcatcaga

SEQ ID NO: 31437 - DNA, 260 bp, Unknown
  Description of Unknown: RightRegion for integrase B5438 sequence
tcaccaatctttgaaattgctgataaagagctactggatattgacgcttatcaactgtaattttcaggggctatgaagcccctttttatgtctcaataagtgcccttcttgttcggattcacagaaaacttccgtaaagcattacccgccttgagtacctttgcagcacctgaattagctgagtctgtgaaggtactttcaccattcttaacactaacgttcttagaacatgctacacgggcttttaacgcttcatctga

SEQ ID NO: 31438 - DNA, 260 bp, Unknown
  Description of Unknown: RightRegion for integrase B5439 sequence
ctttacactgcacccggagctgtgatcctgtcatgcagcaggtcagcggctagcttttaaagcccagaccagagctctctcgtctcgtactctgtcagcggcagctccagctcgccgtcttcgtaaagggcgagttctgcgctggtcagctcgacctcgaacactctgaaggtacctaccgcgtcttcctggtagctgcgctggtcgcggtagctcaagcgatcccactcgcctcgcgcgagcttgacagcgtctgccgc

SEQ ID NO: 31439 - DNA, 260 bp, Unknown
  Description of Unknown: RightRegion for integrase B5440 sequence
gacaatggaacgaggtggggaaagaaccagtacagactggatatttttttgaaaaattgattaccatgatatcggaacatacgaatctgttccatgatgatagttatatattgacttcaacagaaaaaccaccggcaagcggtggttttttctgtgaagtgtgtgtgtatactcgtacgaaagataggatttctacattattattatacctctgatgtttttatgcgtcaagaaaatactttgctactttgtatttcttt

SEQ ID NO: 31440 - DNA, 109 bp, Unknown; identical to SEQ ID NO: 31417
  Description of Unknown: RightRegion for integrase B5441 sequence

SEQ ID NO: 31441 - DNA, 260 bp, Unknown
  Description of Unknown: RightRegion for integrase B5442 sequence
tcaccaatctttgaaattgctgataaagagctactggatattgacgcttatcaactgtaattttcaggggctatgaagcccctttttatgtctcaataagtacccttcttattcggattcacagagtactttcgcagagcattacccgacttaagcacctttgaagcttgctcattagctgaggctgtgaaggtgctctcaccatttttaacgctaacgctcttagagcacgttacacgggcttttagcgcttcatctga

SEQ ID NO: 31442 - DNA, 260 bp, Unknown
  Description of Unknown: RightRegion for integrase B5443 sequence
ccttctgaccctacggataaatgccgtcttgttatcaccctaaagccagtattcttctagctttatctgtattttatatcttgtatagtgtctttctccacaactgtcatatattcgttgggcatcaatacaaatagattccttagggttgcaagtggtatgttcaccaaaaggactttctgccataagtaaaacctccatacatagtgaaacttttgtttccgtcattgacggtgtaacactatatcatatggaggttt

SEQ ID NO: 31443 - DNA, 260 bp, Unknown
  Description of Unknown: RightRegion for integrase B5444 sequence
ttgtcggatttcgcttccaatgcacctgcacggccacctgtggtatatgcaaatgcatagaaaagacggagcgcatggtgcagattcatacacgtgatgaagccgtgacagccgcgtgacaaaccgcgaacgtggcactttaattcgctacccagcaaaggcgaatccgacaattgtgcaaaacctgtggattacgcgaacgcatacgccgtcccgagcgggacagattgcgcgccgctgtggaaaacgttcgccggaat

SEQ ID NO: 31444 - DNA, 75 bp, Unknown
  Description of Unknown: RightRegion for integrase B5445 sequence
aagagttcgaatttgaatggtatggtgacccaagagggattcgaacccccgacaccttgattcgtagtcaagtgc

SEQ ID NO: 31445 - DNA, 260 bp, Unknown
  Description of Unknown: RightRegion for integrase B5446 sequence
gacaatggaacaaggtgggggaagaaccagtacagactggatatttttttgaaaaattgattaccatgatatcggaacatacgaatctgttccatgatgatagttatatattgacttcaacagaaaaaccaccggcaagcggtggttttttctgtgaagtgtgtgtgtatactcgtacgaaagataggatttctacattattattatacctctgatgtttttatgcgtcaagaaaatactttgctactttgtatttcttt

SEQ ID NO: 31446 - DNA, 70 bp, Unknown
  Description of Unknown: RightRegion for integrase B5447 sequence
tcgcatttcaaagtattggtgggcccacctgggatcgaaccagggaccgaccggttatgagccggttgct

SEQ ID NO: 31447 - DNA, 260 bp, Unknown
  Description of Unknown: RightRegion for integrase B5448 sequence
gacgatggtactcgtttcgggcaacatcaatataggttagatatttttttgaaagattaacctatatcatttaggtactgacgaacgtgtaccatgatgatatacgtaaatggcaaataaaaaaacagggctgattgccttgcttttttattgttgatacttcattaaaaattgtttcaactcacaacaccatataacgtgacttggcttctgccatttttttcaacaatacacaatacattgattacgtttcaactcac

SEQ ID NO: 31448 - DNA, 74 bp, Unknown
  Description of Unknown: RightRegion for integrase B5449 sequence
gagtgttcgaacgatgatgttctggtggatcatcaggggttcgaaccccggacaccctgattaagagtcaggtg

SEQ ID NO: 31449 - DNA, 158 bp, Unknown
  Description of Unknown: RightRegion for integrase B5450 sequence
tttgaagacggggaggagttcggatgccgtgcgtctcgctccaccataagtcaaccgtaattttgatagaattacggttgactttttctatgcccaaaaaccgtttgaaatagggcttttcggctgttcaggctcataaacgaaccccgctgcaggca

SEQ ID NO: 31450 - DNA, 109 bp, Unknown
  Description of Unknown: RightRegion for integrase B5451 sequence
cataagagacgtgatgaatatgactttgatatagttttatatcctaagttgcctcattagactattgtattttcaatagtcttttattaatgttataaacaaactgata

SEQ ID NO: 31451 - DNA, 260 bp, Unknown
  Description of Unknown: RightRegion for integrase B5452 sequence
ggacgttgggatcctgatgcgataaagcaatttaagttagaaatatatttaaaggtgtaataagtcacattataacctacatcatttatgagctaattcttcagtaccaatatctgtcaataacgcttgaatttctggatatggcattgtatagcgttgagataaatatctaagtgccgctccaagctctccatcaggtccgcctaattggtcaataataactgccgctgcttttgcattcggtttagtaatgtttatag

SEQ ID NO: 31452 - DNA, 260 bp, Unknown
  Description of Unknown: RightRegion for integrase B5453 sequence
tttgaagacggggaggagttcggatgccgtgcgtctcgctccaccataagtccaccgtaatttcgatagaattacggtggtcttttttaacgcagtgcaagtaattaaatctgcatacagggggcgcagtttcatgagtgaggtgcaattccatatccatcggaaatccgcatttgcgggagttcttttgccgtatcatatgtacattaacggtcagcgcattggaacaatacgcaacgggaaatcactgaatgcaaacg

SEQ ID NO: 31453 - DNA, 260 bp, Unknown
  Description of Unknown: RightRegion for integrase B5454 sequence
ccttctgattctacggataaatgccgtcttgttattaccctaaagccagtattcttctagctttatctgtgttttatatcttgtatagtgtctttctccacaactgtcatatattcgttgggcatcaatacaaatagattccttagggttgcaagtggtatgttcaccaaaaggactttctgccataagtaaaacctccatacatagtgaaacttttgtttccgtcattgacggtgtaacactatatcatatggaggttt

SEQ ID NO: 31454 - DNA, 260 bp, Unknown
  Description of Unknown: RightRegion for integrase B5455 sequence
tcggaggggtgttcatccttgagcacccctgctccaccaagatatgataaatccgcataagcaagctgtttatgcggatttatttttgtttatccccgaaaaatccccgaattattcaagcttcaatataatttcatcaagtacagcgacagctctttcctcctcacgaggatacaaatgtgaatatgtattccaagtcatttcaacatcagaatgaccaagccttctggcaacttcttgaatgttaattccctcgttcg

SEQ ID NO: 31455 - DNA, 260 bp, Unknown
  Description of Unknown: RightRegion for integrase B5456 sequence
cttatacataaaatattcatatgtgaggacggcacctgtgaagttgtgtggaatatataataaaaagcacctattttcgattatgaaaataggtgcttaattttataaatatctgcctgtaatactttttttgttcaattttatttcatgcggtgttccgcttgcaatgattttaccgccgttttcaccgcctccgggtcccatatctataacataatcggcattgcgaattacgtcaaggtcatgttcaataacgatta

SEQ ID NO: 31456 - DNA, 260 bp, Unknown
  Description of Unknown: RightRegion for integrase B5457 sequence
aaaaagaacggaccatacaacaacttccagatcgttgtacaccctcgtattccggtataatttattacttacaccctcttggcacgggttcctcggtgccaatatccgtaagcattccgatcacccgtttatccggcattgcataccgttgtgataaatatcttgtagctgcacctttttcaccatccggtccgccaagctgactcatgatcgccattgcaagctttgcatctgttgttttaatattaaccggatattcc

SEQ ID NO: 31457 - DNA, 260 bp, Unknown
  Description of Unknown: RightRegion for integrase B5458 sequence
aatggtggagagttcgtattccaacccctcacctccaccaataaactaaactgcacttagtttaagtgcagtttttcttttatccaaaattatattatttattatatgctaaaaacctacctaaaataaataggtaggttttttacgaacatttttaattttaattacttaccggtaatactttttattttacggtaattttgcacttggcatattttttacttccgtcttttgcagtagcgataatatagcaagtaccc

SEQ ID NO: 31458 - DNA, 260 bp, Unknown
  Description of Unknown: RightRegion for integrase B5459 sequence
ttgtcggatttcgcttccaatgcaccagcatggagaggaagaaaaacagcgtcacaatgaccggcagaaagctcaaaacgctgccgacgccggtgaaaataccatcgatgacaagcgagtgcagcacagggttcacgttcgctgccgtcatgccgcggtcgacaatatccgtcagcgcgccgatgcccatgtccagtaaattcgataaaaacgcgccgatgacgttaaacgtcagccagaatacaagacccataatgccg

SEQ ID NO: 31459 - DNA, 260 bp, Unknown
  Description of Unknown: RightRegion for integrase B5460 sequence
atttacactgcacccggagctgtgatcctgtcatgcagcaggtcagcggctagcttttaaaacccagaccagagctctctcgtctcgtactctgtcagcggcagccccggaactcagcaaacttgtacctacctcttgtgtaaataattatgtttttactttagtacatgctgaaatacttcgccaccttgtgtgccggtgcatccggatcgcagatgaagtcatgcgccagatcgaagtagaagtcaggcgtgtccacc

SEQ ID NO: 31460 - DNA, 260 bp, Unknown
  Description of Unknown: RightRegion for integrase B5461 sequence
ggactacctaatggtagtccttattttttgcccaaaatagcaaaaaatcgcataatatagcggttttcttttatcaggtgtgcgaattttgctgtttacagcacatttcttgcaatcctgattgctcccctaacgtacttgggattgttttttgagcaaacattaaaccgcccaagcgcaatgcttgggcggttattttaccttaggcacacataactgtatggtatgcctctttcgtttaagcaaacatattcatctct

SEQ ID NO: 31461 - DNA, 260 bp, Unknown
  Description of Unknown: RightRegion for integrase B5462 sequence
tttgaagacggggaggagttcggatgccgtgcgtctcgctccaccataagtccaccgtaattttgatagaattacggtggactttttctatgcccgaaaaccgcttgaaataaggattttcggctatttcggcacacaagtgaaccccgctgcaggcaattctgcggcggggtttgtgcgttttaggaggattgtagctttctgtggcgttgtaatcgttaaacggctggggcaatcgttgaattactggagtattcgtt

SEQ ID NO: 31462 - DNA, 260 bp, Unknown
  Description of Unknown: RightRegion for integrase B5463 sequence
acagcagaaagaaacgaccattcaccaggtaaaataaagcttacgataatacttaaatagtatagtatgccatcatcgcactacttacaccttaccgttaattacttctttagttggatcgatgagcgcataacttccattaggtatttttctgttcatgctttccccgtttactttaagaagaaaagcgtttggatacctttcatgcatgatgctaggaataacaaaagtttcatcgttttctatcatttcgataggtg

SEQ ID NO: 31463 - DNA, 260 bp, Unknown
  Description of Unknown: RightRegion for integrase B5464 sequence
agcagtggttcggatttgaacgcaaatgctccacggatggtcaaggttgaaaaaccttgaccttttcttttgctttcaaacatcccgcagcaaaaagccgaccggacggaggatttttcccctgcccggtcggtttctgtttgcaattgccttatctcggcatcttccgaatatacagcgtcgccgtctgcgaatcaaaaacatacagtgtcacgccataaaatcccttccagaacccctgcgtcacctgcttgatttcc

SEQ ID NO: 31464 - DNA, 260 bp, Unknown
  Description of Unknown: RightRegion for integrase B5465 sequence
cgttttgaagacggggaggagttcggatgccgtgcgtctcgctccaccaacacaatataatccgaaccctttgccgattggccgtgggttcggatttattgttttgtccgccgtcccggcataattttccccgccgccgcataatagacaggggaggggaacgctatgaagcctgctgtttatctgtacggtgtgccgggtcaatacgaaaactatctggcggcactggagagcgccggggcccgggtggtcctgtgccg

SEQ ID NO: 31465 - DNA, 161 bp, Unknown
  Description of Unknown: RightRegion for integrase B5466 sequence
cagaaccatattgatgtgtattattacatgatgaaagccccggaaaaccttgtaaaataaggctctccggggctttacccttggctcataccctctttcggtttggtcaacctctgcgggattagatggaatcagattgataaacagaaaacagataaagg

SEQ ID NO: 31466 - DNA, 260 bp, Unknown
  Description of Unknown: RightRegion for integrase B5467 sequence
gatgctgcaagtggtgaagtgttcggatgctgtgcgcaaagtcccaccataagactgtgataaaaaagatgtcacagtcttttttctttgttgtagcgtcgaaaatcggcgatttcgccaaccgatttttgaacacggttttacagtgttgtccaaccatttttgggcggtttgcccaccctgaagcccactttttctgccgttttttggaatttggcaggggagggggcaatttttttgagaaaaaacagaataaatcc

SEQ ID NO: 31467 - DNA, 260 bp, Unknown
  Description of Unknown: RightRegion for integrase B5468 sequence
tgcgaagactttggaaggggacgcggtggtcaaatttatcttgatatttttttaaagtagacatctatgatgatggtggctataaaagactcttgatactgtttcaagagcctttttaaaaggaggatacctatgagattaacacttatagaaaaagaagatggctataaaatcttagaagagggaagagaaatctattccattcgtgaagaaaaagaaggagaacttctttctatctatttagtgaatctatatggcaa

SEQ ID NO: 31468 - DNA, 260 bp, Unknown
  Description of Unknown: RightRegion for integrase B5469 sequence
attctgattgaccggatcgatattgatgaggatgtcattgaaattacctggaacatctgatgaaacaaaagctaaatctgatggagaacaaaacaacagaaatttctaaaaacaattcttttatttttttgcttgtataagtactctttgcttcaccgaatctctggtaatgcacgatttcacgctgacgcaggaaacggatcggatcacagacttccggatcttttacgagcctgagaatgttatcgtaagtcgtacgg

SEQ ID NO: 31469 - DNA, 260 bp, Unknown
  Description of Unknown: RightRegion for integrase B5470 sequence
cagaaccatattgatgtgtattattacatgatgaaagccccggaaaaccttgtaaaataaggctctccggggctttgcccttggctcataccctctttcggtttggtcaacctctgcgggattagatggaatcagattgataaacagaaaacagataaaggaaatcgcaagcagcaatggaacagccatcatcagacggcgaatgacatatcgtttcacagcttttcccctctttcttatagattttcaggtcttatctt

SEQ ID NO: 31470 - DNA, 260 bp, Unknown
  Description of Unknown: RightRegion for integrase B5471 sequence
acctacgcctacggcatacgcaggggcttcgcgctcctggtcaccgatgtggcgctgtgactatcctatcacgagctgttggcctgggtagatgcgattggggtctgcgattccgttcgctgccgcgatttcctgataggtcgtgccgaacttcgcggcgatgcccgagagggtgtcgccgctctgcaccgtgtacgtgtgcttggtcgataccgtgccgccgatcgggattgacaggcgctgcccggtgtagatgaggt

SEQ ID NO: 31471 - DNA, 260 bp, Unknown
  Description of Unknown: RightRegion for integrase B5472 sequence
aggttatcggattacgcttccaatactccagtggagcaatggcaacaaatgaatgggtagacggtggcgtctattatgtggatgcgaatggaatctacattccagggaagacacagacaaccggaaattggcagaaagacaacactggctggtggtatcaaaatgcagatggttcctatccaacagacaaatgggaagaaatcaattctaaatggtatcactttaatgcaaacggttatatggagacgggatgggtcaca

SEQ ID NO: 31472 - DNA, 109 bp, Unknown
  Description of Unknown: RightRegion for integrase B5473 sequence
gaaaaccccgcagtcaaaatgctgcggggttcgagtgaagattgtttggtgacccggtagggattcgaaccctagacctactgattcgtagtcagtcactctatccagc

SEQ ID NO: 31473 - DNA, 72 bp, Unknown
  Description of Unknown: RightRegion for integrase B5474 sequence
gagagttcgtatctcaatcaaatggtgatccacccgggattcgaacccgggacaccctgattaaaagtcagg

SEQ ID NO: 31474 - DNA, 260 bp, Unknown
  Description of Unknown: RightRegion for integrase B5475 sequence
attctgattgaccggatcgatattgatgaggatatcattgagattacctggaacatctgatgaaacaaaagctaaatctgatggagaacaaaacaacagaaatttctaaaaacaattcttttatttttttgcttgtataagtactctttgcttcaccgaaacgttggtagtggacgatttcacgttgtcttaagaaacggatcggatcgcatacttcaggatcttttacgagacgaagaatattatcgtacgttgtacgc

SEQ ID NO: 31475 - DNA, 69 bp, Unknown
  Description of Unknown: RightRegion for integrase B5476 sequence
tcgcattttagcgttttggtgggcccacctgggatcgaaccagggaccgaccggttatgagccggttgc

SEQ ID NO: 31476 - DNA, 260 bp, Unknown
  Description of Unknown: RightRegion for integrase B5477 sequence
cgttttgaagacggggaggagttcggatgccgtgcgtctcgctccaccaatgcaagataatccgaaccttagaccaatcggtcatgggttcggatttattgtttttatcaaggacattgaagtttagtttcgggatagaataacatcaaattcaggaggatatacccatgaaaaagcccataagctgtgcgttcaatatggataccgcctgtgtggagcttcgcttcacggacgggagcatttgctccatcgactgcacc

SEQ ID NO: 31477 - DNA, 101 bp, Unknown
  Description of Unknown: RightRegion for integrase B5478 sequence
accaaaatgatgacgggaaattccgggtgttcgcgttgcgaacgtttggtgacccggtagggattcgaaccctagacctactgattcgtagtcagtcactc

SEQ ID NO: 31478 - DNA, 260 bp, Unknown; identical to SEQ ID NO: 31464
  Description of Unknown: RightRegion for integrase B5479 sequence

SEQ ID NO: 31479 - DNA, 153 bp, Unknown
  Description of Unknown: RightRegion for integrase B5480 sequence
aggttatcggattacgcttccaatactccacttttgaatctcccacataaaaggtcatagcctcaaagtcaaagtgaaaaagatcaatatgggtcggtgcatttttatggcttgacgcttgctttcgcagttgggtattcacccttgcccgca

SEQ ID NO: 31480 - DNA, 129 bp, Unknown
  Description of Unknown: RightRegion for integrase B5481 sequence
acgttgtcggatttcacttccaatgcaccagcattgcgcagaagtataactgtgcgctgacccggctggactttcagcaggaggaaggactgatgagcagtctcccgctggggctgaatcagatcgaga

SEQ ID NO: 31481 - DNA, 260 bp, Unknown
  Description of Unknown: RightRegion for integrase B5482 sequence
cagtgttcgtctaatgttcatatggtgcaccatcggggactcgaacccaggacccactgattaagagtcagtaccgggcaacgatacaacgttcaaattatcgttttaccgttagtctcaggtagtcaaaagtagtcagaatggctccgggatgtagtcagtttgtagtcaggcagttcccgccgtactatccgcggcgggcggggcagagttgaaataatcgtccagtttgccacttactttcaggccgtcttcggctt

SEQ ID NO: 31482 - DNA, 260 bp, Unknown
  Description of Unknown: RightRegion for integrase B5483 sequence
cttcccggttcggatatggggagtagtagtccaccacaaagacctgtcagagaaatctgacaggtcttttcttttggtttaaacatgcggaaaaatcaaaacccgtcgatcagccgctcggcaatgggggagatgaacagcacaaaaagcagtacgccaagccccgtgataaggctggctgcgtcgccgccgatgtaccaccccagcgggaaggtgagcagcagaagcccgggcacggcaaagcagttcagtaaaaacgc

SEQ ID NO: 31483 - DNA, 260 bp, Unknown
  Description of Unknown: RightRegion for integrase B5484 sequence
gtggagctcaaccccaatcatgttgagcctagggaaggcaacggcctcccgctgccataagaaaagcctggaacatcaatggttccaggcttttcttatgccattttgtggtttgacccttattcctcaaaaataaagaaaatgaaaaggaagtgactcccccagaaaggtaagccactttcttttatttatcttggtttacgcagttttgacatgtgtattttccattgggtaatgcttttaagttttctgtagattgg

SEQ ID NO: 31484 - DNA, 260 bp, Unknown
  Description of Unknown: RightRegion for integrase B5485 sequence
cgttttgaagacggggaggagttcggatgccgtgcgtctcgctccaccaaaacaatataatccgaaccttgtgccgattggtcatgggttcggatttattgtttctatcgaagaaatcgaagactggtaatagaaaaaccgggaggactaccgattgcggcaatcctcatggttgctttatgtaggcgctttgtccgacgcttgcttcgttgccttccactcggcaaatgcctccttgccttcttcgctctcgtaatatt

SEQ ID NO: 31485 - DNA, 101 bp, Unknown
  Description of Unknown: RightRegion for integrase B5486 sequence
gaaaaccccgcagtcaaaatgctgcggggttcgagtgaaaatcatttggtgacccggtagggattcgaaccctagacctactgattcgtagtcagtcactc

SEQ ID NO: 31486 - DNA, 128 bp, Unknown
  Description of Unknown: RightRegion for integrase B5487 sequence
acgttgtcggatttcacttccaatgcaccagcattgcgcagaagtataactgcgcgctgacccggctggacttccagcaggaggaaggactgatgagcagtctcccgctggggctgaatcagatcgag

SEQ ID NO: 31487 - DNA, 260 bp, Unknown
  Description of Unknown: RightRegion for integrase B5488 sequence
tgctgcaaggaatggggagccaaagcaattctaagcactaaccatcgagaaaaggtatagagagtgatatttgtgaatctcttcctttgaacgatggttagtgtcgttttatacagttttattgtatttatttgaaatatggaaggtcaagcctccgtatgcgtacattttgtatgcgtacggaggctttttttgttgctccgaaaaggagactaatactaattccaaatcagcctatagacaaaatccattttctgccg

SEQ ID NO: 31488 - DNA, 260 bp, Unknown
  Description of Unknown: RightRegion for integrase B5489 sequence
actaaagctctacaagagcatttacgtaaactaaaagaaggaacttctgatgaagactgaaaaagaatactatctgggtgagcattcatgtggtcttgcgtgtccttgtaactactacaagaacactttagagattgaatgggctaataagaatatgcctaagtggaaagctgagcttaataaaatgatatctctaaacgaaaaagagattgttcctcattattatcatttagataaagatggaaactgtttgttcggtg

SEQ ID NO: 31489 - DNA, 260 bp, Unknown
  Description of Unknown: RightRegion for integrase B5490 sequence
cagctcattgccgtcataaaagctacggaaaacacctgtgaaattacatggaaggtctgattttttatacttcatcttgattgcagtgcttcgccgaagcgctgaaaatgcacgacctcccgctcccgcaggaatttgatgacgtcgttcacatccgggtcgtcagaaagccgcagaatattgtcataggtcacccgcgccttctgttccgccgccatgtcttcaacaaggtcggccatggggtcgccttttaccgccat

SEQ ID NO: 31490 - DNA, 260 bp, Unknown; identical to SEQ ID NO: 31476
  Description of Unknown: RightRegion for integrase B5491 sequence

SEQ ID NO: 31491 - DNA, 260 bp, Unknown
  Description of Unknown: RightRegion for integrase B5492 sequence
gatgcatcgactggaggagcgttcggatgctgtgcgcagtgtcccaccataacaatataatccgaaccttttaccaattggtcatgggttcggatttattgttttaatggaagaaattgaagactggtaatgaaaaagccgggaggactgccgattattgcaatcctcccggcttctttatgtagatgcggagtccgaaatctccttctttgctttccattcgtcaaaggcccttttgccatcttcactttcgtagtact

SEQ ID NO: 31492 - DNA, 260 bp, Unknown
  Description of Unknown: RightRegion for integrase B5493 sequence
gaaaagattgaattcagccgcgataacgacgatgaattcatcttagacatctatttctaaagacaccgggcaatgatcagaacccatgatatctgtatggatatcagcggcttcaatcttatcctttgcaaagtcggatgtcagaaaataatccagacgccatccggcatttctttctctggctttgaaccgataggaccaccaggaatatttaacttcatccggatgcatatatctgaacgtatctgtaaagccggagt

SEQ ID NO: 31493 - DNA, 260 bp, Unknown
  Description of Unknown: RightRegion for integrase B5494 sequence
agaaaaccaggttcaaagaaatctaaggtagaaattacgatccatccaaagatagaataaaactgacataaacaaaccgataaccaattcaacgttttatcaggttcatttgccggtggtgaaggtgattatgttgcattatttgaacctgctgcttctgaaatagaaaagcaaggtaagggctatgtagtagcttctattggtgaagaatctggacttattccttacactgcttattctgcacctaaagattatataaa

SEQ ID NO: 31494 - DNA, 260 bp, Unknown
  Description of Unknown: RightRegion for integrase B5495 sequence
tttgccgacgatccacccgagggcgagagttcggattttaatgcttgtggttcaccataaaccgaaccgtagcccgagaagcaagaagggctgcggtttttcattttttaagtgcggtatcaagaggggaaagggagcaaaagttgactgtagttttagagggaatcaagtgcacatattttttgaccatttcaaggcttgtatgcccgagaattaattgcagactgtagatatcgccgccgttctccaaatagcgtgta

SEQ ID NO: 31495 - DNA, 260 bp, Unknown; identical to SEQ ID NO: 31476
  Description of Unknown: RightRegion for integrase B5496 sequence

SEQ ID NO: 31496 - DNA, 260 bp, Unknown
  Description of Unknown: RightRegion for integrase B5497 sequence
gaacctgacgggtataaaatcaccaccgcatataacctaacctcttgcaaaactgaatgaccctacccaattcgaacaagccgatgagacttgaggattgggtggggtcattttatgtcctgaaagtcttggtatgacagggatttcagtgagtggcgcgctgaagcaaatatgagacacaaaaacacaaaccgcttcaatttggcgtagaaaacaaaaaaatcaggcggttcgaacatggatgtctcatttgacattct

SEQ ID NO: 31497 - DNA, 109 bp, Unknown
  Description of Unknown: RightRegion for integrase B5498 sequence
gtcaaggaaataagaatagatggcataaataaaaaaacggagctagaaacttacttctaaccccattaaaattatctactattcttttcgtatggttgaccatctgctg

SEQ ID NO: 31498 - DNA, 260 bp, Unknown
  Description of Unknown: RightRegion for integrase B5499 sequence
tattttcgtcaaagccgaacttcccccttcgcttttgatgtcacatttatcaatatgtaatgcaaaaagagccgcaatcatgcggctctcttatttcttataaggtgtacaatgttattcgctgcaagaatcatagattctctccgcatcgatacagacagcctctttaaagcaggtgcagtcattaggtcggaatgctttcgattctgccataatatccctccgtttgattcctgcggcctgccagaggaaaagccgca

SEQ ID NO: 31499 - DNA, 260 bp, Unknown
  Description of Unknown: RightRegion for integrase B5500 sequence
gacactaaagcacttaaggagttaatagatggattcaacaaagaacggcgagaaagatgagttggatttgttaatggaacgcatgatggacccgtcttttcctgtgtacatcaaggaaaacaatattgtcgttttcccgattgaaccaaatgtatattgtttttcatcggttgaagatgctgaaaaacgaggataccacgtaaaagatatggagcattatgatacgttgagtatcacagaaaagaaaaactttaatcttt

SEQ ID NO: 31500 - DNA, 260 bp, Unknown; identical to SEQ ID NO: 31474
  Description of Unknown: RightRegion for integrase B5501 sequence

SEQ ID NO: 31501 - DNA, 260 bp, Unknown
  Description of Unknown: RightRegion for integrase B5502 sequence
attctgattgaccggatcgatattgatgaggatgtcattgagattacctggaacatctgatcaaacaaaagctaaatctgatggagaacaaaacaacagaaatttctaaaaacaattcttttatttttttgcttgtataagtactctttgcttcaccgaaccgctggtaatggacgatctcacgttctctcaggaacttgataggttcgcatacgtcatagtctgttactacccggaggatgttgtcataggtactccgg

SEQ ID NO: 31502 - DNA, 260 bp, Unknown
  Description of Unknown: RightRegion for integrase B5503 sequence
aaaaaagagataccagatgaaaggtatctctttttatttattagtatgtacaagacttgaacttgcggcaggcttctccgaattcgacgagctaaagcgaagtgcgaatttgggagaaacagtccgatggactgtttcgtagaaggctagttcagttccgtgtcacctcgaccatttgaccttagaaagcaaatgcttcctaagggattgttttttgagcaaacattaaaccgcccaagcacaatgcttgggcggttatt

SEQ ID NO: 31503 - DNA, 176 bp, Unknown
  Description of Unknown: RightRegion for integrase B5504 sequence
tattttcgtcaaagccgaacttcccccttcgcttttgatgtcacatttatcaatatgtaatgcaaaaagagccgcaatcatgcggctctcttatttcttataaggtgtacaacgttattcgctgcaagaatcatagattctctccgcatcgatacagacagcctctttaaagcagg

SEQ ID NO: 31504 - DNA, 260 bp, Unknown
  Description of Unknown: RightRegion for integrase B5505 sequence
gaggcagcggtggagggtgatccgggcggttcgtgttttgcgccgtccggcgcatcatgaaaatcagcagagaagatctgctgatttttgcgttataattatggtgatataaattttgtattttggcatgtcttttttcagtaagctatcgaataaattctcctgcaagtacaatcattctttcaatccatgaaatgaacaaagtataacataatgaacaaagtgtaacataatgatacaaatttacagtatttgggaaa

SEQ ID NO: 31505 - DNA, 260 bp, Unknown
  Description of Unknown: RightRegion for integrase B5506 sequence
gatatgtcagtgcacggttcggattgtctattatatggggagccagaaaaaagcccgtaaacactgcgtttgcgggcttttcttattttttctcagtgcctttgaaaaggcaaaatagctcacttgcctgcaaaattgagcgagtgagcgataaccggaaaatttcgattcaaagcacggaatatgattgcctatcctttgtttgagaaggtcaatttacgcggccccgcattttttaatgcggggccttttttgtttgg

SEQ ID NO: 31506 - DNA, 260 bp, Unknown
  Description of Unknown: RightRegion for integrase B5507 sequence
gatgctgcaagtggtgaagtgttcggatgctgtgcgcaaagtcccaccaaaaggctgtgacaataatgttgccacagccttttttcttcgttgtaacgccaaaaattgaccaactttgcgtcgatttttggcgcttatttttatggagatgtccacctgttttcaaggtgaaagaccagctttctgctcagaatttcccgattttcagaaaaagggcaggggagagaagcaaattttcagaaaaaatgggtgcattttct

SEQ ID NO: 31507 - DNA, 260 bp, Unknown
  Description of Unknown: RightRegion for integrase B5508 sequence
gatgctgcgcgcggtgaagtgttcggacactgtgcgcaaagtcccaccaaaagcctgtgacaaaaaagatgtcacaggcttttttctttgctgtatcgttgaaaattggcggtttcgacagctaattttcgagttgctttttataaagatgtccagcggttttcagactgttggacatttttattgcctcatcttcccgcaaaattctgaattgcggcaggggagagggcaattttttttgagaaaaacagaataaatcc

SEQ ID NO: 31508 - DNA, 260 bp, Unknown
  Description of Unknown: RightRegion for integrase B5509 sequence
gctccaccaaaagtcaaaatccgaacattatcatcaatggtgatacgttcggatttttgatttttatgagtttttataatttagaaattactgtggtttgtagcatattctcggcctcctccaagccttgcatcacttccgccatgatgcgagtggccaagataaatcctgaactgaacgcttcacactcagtgatgcaagacagttcacttgtgcagtccttgattttttcaaaggtttctttttgtttcattgtcaga

SEQ ID NO: 31509 - DNA, 260 bp, Unknown
  Description of Unknown: RightRegion for integrase B5510 sequence
cgttttgaagacggggaggagttcggatgccgtgcgtctcgctccaccaacacaatataatccgaaccccttgccgattggccgtgggttcggatttattgttttgtccgccgtcccggcataattttccccgccgccgcataatagacaggggaggggaacgctatgaagcctgctgtttatctgtacggtgtgccgggtcaatatgaaaactatctggcggcactggagagcgccggggtccgggtgatcctgtgccg

SEQ ID NO: 31510 - DNA, 101 bp, Unknown
  Description of Unknown: RightRegion for integrase B5511 sequence
gaaaaccccgcagtcaaaatgctgcggggttcgagtgaagattatttggtgacccggtagggattcgaaccctagacctactgattcgtagtcagtcactc

SEQ ID NO: 31511 - DNA, 260 bp, Unknown
  Description of Unknown: RightRegion for integrase B5512 sequence
accctgattgaatctattcatgttggacacggtaaagttaaaattgcatggaaaatctgatgtggtagtctgattgttttgctttctcggttttacctccgaatgattgtgatcctgtcttatgcgcacggttaaagaatcagtttgctgttctccatttaaatgatttgtatagtaagcatgccgcagaagagatgattgcagttttcaatcgtcatttgcgcatctataaagttgcaggcacaataggagtaaaagaa

SEQ ID NO: 31512 - DNA, 260 bp, Unknown
  Description of Unknown: RightRegion for integrase B5513 sequence
gatatagagggagtaagatatcactcaaaagtcaaattggatgtttattttaaattttaagcgaggtgtttcaaaatgcaggaaaatgaaacttatgtaatctatttgagaaagtctcgtgcagatagcgaaaaatctagtttagaagaagtatttgcaaaacacgaatcagaactccagtcactcgctgaacgcactttaggcaatcgtattcctgaagataaaatctttcgagaggttgtatctggcgaaacaatcac

SEQ ID NO: 31513 - DNA, 260 bp, Unknown
  Description of Unknown: RightRegion for integrase B5514 sequence
accctgattgaatctattcatgttggacacggtaaagttaaaattgcatggaaaatctgatgtggtagtctgattgttttgctttggcattgctaacaataaataatgttgatataataacaatataacacaggcacagtatttgaactctaaggcacagttgaacaagcggagcatggccgcataggccgggagataacagcatatggatgaaacggtatttctggcgcatattgcggaagacggaagagaacaaacgg

SEQ ID NO: 31514 - DNA, 260 bp, Unknown
  Description of Unknown: RightRegion for integrase B5515 sequence
accctgattgaatctattcatgttggacacggtaaaattaaaattgcatggaaaatttgatgtggtagtctgattgttttgcttttccgctctatctaagtcaatttcttcaacaagtcccggtttaatgggattcttaggcaacaaataaacataaccaagtgttgccataggaaagcggtcatgcaaggaaatgcattcaccaataatgccctcataatagttttccaagttctttcctacagaggacatttgacttc

SEQ ID NO: 31515 - DNA, 260 bp, Unknown; identical to SEQ ID NO: 31512
  Description of Unknown: RightRegion for integrase B5516 sequence

SEQ ID NO: 31516 - DNA, 260 bp, Unknown
  Description of Unknown: RightRegion for integrase B5517 sequence
cttttgaggtatctgctgttgcccagcagaacgatagcgcaccgccaatccaggccttaatggagccggatggcagtgggattatcgtttgtttttagggctaccgtttaatttgtaggctatcgttttattttgggatggtcccccttcatgcttgactttattcggctggcggcatataatgaaacgggtcgaaaagactatttttgaaaccgaggcgtggtttaatggagtacattaccattcaggatgccgcagag

SEQ ID NO: 31517 - DNA, 171 bp, Unknown
  Description of Unknown: RightRegion for integrase B5518 sequence
gatatagagggagtaagatatcactcaaaagtcaaattggatgtttattttaaattttaagcgaggtgtttcaaaatgcaggaaaatgaaacttatgtaatctatttgagaaagtctcgtgcagatagcgaaaaatctagtttagaagaagtatttgcaaaacacgaatca

SEQ ID NO: 31518 - DNA, 260 bp, Unknown
  Description of Unknown: RightRegion for integrase B5519 sequence
accctgattgaatctattcatgttggacacggcaaagttaaaattgcatggaaaatttgatgtggtagtctgattgttttgctttatcaaaccctttgtcaaaaccactcaatgtaatttgaggctttaactctccatcctccactttatagaaccggtgcaaatcgtgaagaattggttcaagcaaaaatttcccgacgccacatgcaggatcacaaattttcatccccggagtgatgtctatcatattgacaatagct

SEQ ID NO: 31519 - DNA, 157 bp, Unknown
  Description of Unknown: RightRegion for integrase B5520 sequence
accctgattgaatctattcatgttggacacggtaaagttaaaattgcatggaaaatttgatgtggtagtctgattgttttgctttctcaaatcgacgtctacaagttcgggagcggattgggcgcattcgatgttgttaattaattcctttacccac

SEQ ID NO: 31520 - DNA, 260 bp, Unknown
  Description of Unknown: RightRegion for integrase B5521 sequence
accctaattgaatctattcatgttggacacggtaaagttaaaattgcatggaaaatttgatgtggtagtctgattgttttgcttttcctttcacttgaatttcatctgttctgtcggtttctcctggatatcgatcaccctggtgtcaccgaacttttcaatgcacatggccaggtgttctttgaccgcctgggcctggatgaccggcgcattgacttcaattgttactatcaacatttcaaatctcctgaatgcggatt

SEQ ID NO: 31521 - DNA, 260 bp, Unknown
  Description of Unknown: RightRegion for integrase B5522 sequence
aaaattgtagattctataacttgggatggtgctgatgggatagatataaatttaaaataaaaacacgcttttttgcgtgttttttactgtctttttatatgtcttgcacaatctgtccattccaaaagacaacaaaagagttaacaataagttaaccctttattctatctttctgctttcatatatcctattatatagtatttaagttcttttggtaaatctattactatttcttcacccttatattctataactgcttt

SEQ ID NO: 31522 - DNA, 260 bp, Unknown
  Description of Unknown: RightRegion for integrase B5523 sequence
aaaattatagattgtatagtttgggatggagctgatgggttaaatataaatttaaaataaaaaaaacacgcttttttgcgtgttttttttgatgtctttttaaatgtactgcacaaccagaccatccacctccaataacaacaattttcatataaatctcctcccctcaaaaatgtctcttggatttgcttgtaccttacagaatctctttactctatggcctgaaaatcttgtagtacagctaccacacacaccttctc

SEQ ID NO: 31523 - DNA, 260 bp, Unknown
  Description of Unknown: RightRegion for integrase B5524 sequence
ttaatcagaaagattattttaaccaggaatgatgttgtaatagaatgggcttttatttaacccattttttatgatacaaatcgaatcacgaatataagctattacgtgggtaaatagataaattcgtgattccacagcaaaatccctccctacttttctggtagggagggaaaatttatatttttttgcgcctaactttaacatggcgcttgttcacagatctgtccatctttttgaggatttcccgcatgatgaaatag

SEQ ID NO: 31524 - DNA, 260 bp, Unknown
  Description of Unknown: RightRegion for integrase B5525 sequence
aaaaacattgatattatcctagatgcagacaaaattactaatatggttatgggccaatagcacattgaaagaatacctgttaaaaggctttattcttgacacggacctttaaaaaacaacttttacacctcaagcaaatcctccataccacaattcaaggccttagccaaccgccaaactgtctctgcactagccttattgatattcttatggcgctgttcatacatttggatggagcgagaattaacaccagaaactct

SEQ ID NO: 31525 - DNA, 260 bp, Unknown
  Description of Unknown: RightRegion for integrase B5526 sequence
accctaattgaatctattcatgttggacacggtaaagttaaaattgcatggaaaatttgatgtggtagtctgattgttttgctttagctatacaatcaacatacaacatcttttaagcctcgtgaaactactcaatccgaggcgcatacatagaaatgttcgtttataagaccgctgtttagattaaacaacgctgttataagtgaacattcaaaagctgaatttataatggacagttaaacaacctcaaagcgaacgca

SEQ ID NO: 31526 - DNA, 260 bp, Unknown
  Description of Unknown: RightRegion for integrase B5527 sequence
accctgattgaatctattcatgttggacacggtaaagttaaaattgcatggaaaatttgatgtggtagtctgattgttttgctttagctatacaatcaacatacaacatcttttaagcctcgtgaaactactcaatacgaggcgcatacatagaaatgttcgtttataagaccgctgtttagattaaacaacgctgttataagtgaacattcaaaagctgaatttataatggacagttaaacaatttcaaagcgaacgca

SEQ ID NO: 31527 - DNA, 260 bp, Unknown
  Description of Unknown: RightRegion for integrase B5528 sequence
accctgattgaatctattcatgttggacacggtaaagttaaaattgcatggaaaatctgatgtggtagtctgattgttttgctttgacaaaacatccagaaaaaaatccaatacatattttgactttatgtcatcgtgccccttgtggcctattccgggaataatatccatagatacgttaagtccgtttttctcatagttctttctgagattgataagcctttccattcggcttgttccccattttgactcacccacat

SEQ ID NO: 31528 - DNA, 260 bp, Unknown
  Description of Unknown: RightRegion for integrase B5529 sequence
accctgattgaatctattcatgttggacacggtaaagttaaaattgcatggaaaatttgatgtggtagtctgattgttttgcttttcgaaggtttcatccatattgtcacgaagttttaccaagatagcagctctcgggcagtcccagcctgtggcaacagcttgcttgatgataacagcaacagaaggagcattggtttcttcaatgccatccaagttttcgtgcatatcagagagccatactgcaagctggccattct

SEQ ID NO: 31529 - DNA, 260 bp, Unknown
  Description of Unknown: RightRegion for integrase B5530 sequence
acgaaaacagaatcgggaagccatatcgaaccgcagctagagtacactctgcgaatctgattcggcttccctctcttttaaagctataaggtagcattgagaatccgatttatcggatacccaatgatgccagagaacgaaagcccctcaaacgaggggcttttctcgatgtttcacgtgaaacctatgctgttcgccgccacatgtacacagccaggtatgggggaaggttgttgtgcggctggtttccacccgcgtac

SEQ ID NO: 31530 - DNA, 260 bp, Unknown
  Description of Unknown: RightRegion for integrase B5531 sequence
tgcgaacttacaattcttacaccgtcattgcttgctatctccaatattttcaaaaaatagtatagcacattttctttcgattgtcaacaaaaatccggcagtacaacccaggaaatctcctgctgtactgccggctttctgcttgttatttacttatactgccgtcaaatctcacggaaattatcaacgctcacgtaccctgtgacgtacttgcctgctggtttcttgccgcagtagtccttgcgtgtcgtgatccggaa

SEQ ID NO: 31531 - DNA, 260 bp, Unknown
  Description of Unknown: RightRegion for integrase B5532 sequence
gatatagagggagtaagatatcactcaaaagtcaaattggatgtttattttaaattttaagcgaggtgtttcaaaatgcaggaaaatgaaacttatgtaatctatttgagaaagtctcgtgcagatagcgaaaaatctagtttagaagaagtatttacaaaacacgaatcggaactccagtcactcgctgaacgtactttaggcaatcgtattcctgaagataaaatctttcgagaggttgtatctggcgaaacaatcac

SEQ ID NO: 31532 - DNA, 260 bp, Unknown
  Description of Unknown: RightRegion for integrase B5533 sequence
acgctaatagaatcaatcaaagtaggacagggaaatgttcaaattgcttggaaaatatgatatggtagtctgattgttttgctaaagctatacaatcaacatacaatatctttttatgctccggaagtctataaaaccggggtaatacataacaatttgtgtgcgcttataagagtgctttgcggataaaagcattgttataaaagcacaggcgtaaaaaaatagggtaggaacggagatttatccgcgcctacccttta

SEQ ID NO: 31533 - DNA, 260 bp, Unknown
  Description of Unknown: RightRegion for integrase B5534 sequence
accctgattgaatctattcatgttggacacggcaaagttaaaattgcatggaaaatttgatgtggtagtctgattgttttgctttacctgctcaatggagtgggatacaaatacgaccgttgcaccggaattgatcatcttcttcatgcggtcaaagcttttctcctgaaatttgtagtcacccactgccagaatctcatcaataattaaaatatccgggatgttcatcgtcgcaatagcgaagccgagccgggccacca

SEQ ID NO: 31534 - DNA, 260 bp, Unknown
  Description of Unknown: RightRegion for integrase B5535 sequence
cagcgttttgaagacggggaggagttcggatgccgtgcgtctcgctccaccagaacatagaaaaccagcaatccattgagattgctggtttttctttatttatcaatgctgtgtggcgctctcagagggatttcgctccctgcaaacattgaaaccgcaagctatttgtgttataaaaacttccaaaactcagagtcgggcgaaccgtgtaagtttgtccgactcttaccttttcacgataacagcaaaaaatcctgcag

SEQ ID NO: 31535 - DNA, 260 bp, Unknown; identical to SEQ ID NO: 31512
  Description of Unknown: RightRegion for integrase B5536 sequence

SEQ ID NO: 31536 - DNA, 260 bp, Unknown
  Description of Unknown: RightRegion for integrase B5537 sequence
ttaatcagaaagattattttaaccgggaatgatgttgtaatagaatgggcttttatttaacccattttttatgatacaaatcgaatcacgaatataagctattacgtgggttatctccgtcatgctaccgccgatggccatctttttcccactatttacccttttggaggactcgggttatcttccccggatcgcctttaatatggataaacatttcaaaaaggccggcgcgcatggaaagcagtccttaaccatgtgca

SEQ ID NO: 31537 - DNA, 260 bp, Unknown; identical to SEQ ID NO: 31525
  Description of Unknown: RightRegion for integrase B5538 sequence

SEQ ID NO: 31538 - DNA, 86 bp, Unknown
  Description of Unknown: RightRegion for integrase B5539 sequence
accctaattgaatctattcatgttggacacggtaaagttaaaattgcatggaaaatttgatgtggtagtctgattgttttgctttg

SEQ ID NO: 31539 - DNA, 260 bp, Unknown
  Description of Unknown: RightRegion for integrase B5540 sequence
accctgattgaatctattcatgttggacacggtaaagttaaaattgcatggaaaatttgatgtggtagtctgattgttttgctttagctatacaatcaacatacaacatcttttaagcctcgtgaaactactcaatccgaggcgcatacatagaaatgttcgtttataagaccgctgtttagattaaacaacgctgttataagtgaacattcaaaagctgaatttataatggacagttaaacaacctcaaagcgaacgca

SEQ ID NO: 31540 - DNA, 109 bp, Unknown
  Description of Unknown: RightRegion for integrase B5541 sequence
aaaattatagattgtatagtttgggatggagctgatgggttaaatataaatttaaaataaaaaaacacgcttttttgcgtgtttttttgatgtttttttaaatgtactg

SEQ ID NO: 31541 - DNA, 260 bp, Unknown
  Description of Unknown: RightRegion for integrase B5542 sequence
accctgattgaatctattcatgttggacacggcaaagttaaaattgcatggaaaatttgatgtggtagtctgattgttttgcttttccttttgcggaaacagccaataccattacggacatgagcataatgactgtcaacgccaacaccaaatgtcgtcttacaaatttcatagcaaacctccatatcgaatctgtgttgtcatcaaccattgccttttaccgctgatggcctgcggtaagcaatatgcgaatccccgac

SEQ ID NO: 31542 - DNA, 260 bp, Unknown
  Description of Unknown: RightRegion for integrase B5543 sequence
accctgattgaatctattcatgttggacacggcaaagttaaaattgcatggaaaatttgatgtggtagtctgattgttttgctttcgtggctgtttcaataataataggattatgctccattaaagttattccgatatgtttattagagtccagcatgctggcaatatgaaagttgccgtcatccggcagttcgtatcctgaatgagtttgtcccataagtccctgggcttgatcctcaattcgaattttgaaccgcacg

SEQ ID NO: 31543 - DNA, 260 bp, Unknown
  Description of Unknown: RightRegion for integrase B5544 sequence
cgtaagcacgaatcgggtagtgatatcgagcctgaactatgctttaaactcttaatttaatccgtctgcaagcatcgcgtatctgatttatcggacactcaatgcttacagacaataataatggcggatagtcgaatggctacccgccttttattatggtcagcttacccgcttccacatgaaaacagccaagtacggaggcatattattgtggggcttcccgccgcccgcgaacatggtctgcacgttcccgccgtaac

SEQ ID NO: 31544 - DNA, 260 bp, Unknown; identical to SEQ ID NO: 31543
  Description of Unknown: RightRegion for integrase B5545 sequence

SEQ ID NO: 31545 - DNA, 260 bp, Unknown
  Description of Unknown: RightRegion for integrase B5546 sequence
accctgattgaatctattcatgttggacacggtaaagttaaaattgcatggaaaatttgatgtggtagtctgattgttttgctaaagctatacaatcaacatacaacatcttttacgcctcgtgaaattactcaatccgaggcacatacatagaaatgttcgtttataagaccgctgcttaaattaaacaacgctgttataagtgaacattcaaagatggacattcataataggcaatgacctcatctcaaagcgaacgc

SEQ ID NO: 31546 - DNA, 260 bp, Unknown
  Description of Unknown: RightRegion for integrase B5547 sequence
gatatagagggagtaagatatcactcaaaagtcaaattggatgtttattttaaattttaagcgaggggtttcaaaatgcaggaaaatgaaacttatgtaatctatttgagaaagtctcgtgcagatagcgaaaaatctagtttagaagaagtatttgcaaaacacgaatcagaactccagtcactcgctgaacgcactttaggcaatcgtattcctgaagataaaatctttcgagaggttgtatctggcgaaacaatcac

SEQ ID NO: 31547 - DNA, 260 bp, Unknown
  Description of Unknown: RightRegion for integrase B5548 sequence
accctgattgaatctattcatgttggacacggtaaagttaaaattgcatggaaaatctgatgtggtagtctgattgttttgctttggcaaaatatagaaaagcaacgaacgaagcagcacaaaggaggaagaaccatgaaggtatcggatttcgttgaaggtaaattgatggaaattggcgccacaccggaatatactggttataagtatctggtatgcgccatagtaatgtcgatgcagaacgagtatcttttgaataa

SEQ ID NO: 31548 - DNA, 260 bp, Unknown
  Description of Unknown: RightRegion for integrase B5549 sequence
gataaccgaacaagaaatgatgattccccttttactatcaaaatcattcttaatctttaattccatcatcaatgtgctaattcttcagtacccagagaagcatcggaaatgttccaaatcaaagcgaactttgcggcgttataattagagttaaaacacttttaatagctgctgcaataggagcacatcaatcttctattgctttttcaataacggaaaccaattcacttacagtaccggcagaatgaataagatttaaa

SEQ ID NO: 31549 - DNA, 260 bp, Unknown
  Description of Unknown: RightRegion for integrase B5550 sequence
tgcgaacttacaattcttacaccatcattgcttgctatctccaatattttcaagaaatagtatatcacattttctttcgattgtcaacaaaaaccggcagtacagcaggagatttcctgttttgtaccgccggtttttctgtataattatgccttatttacactttccgaaaattatccacgctcacataccccgtaacgtactttcccaccggcgccttaccgcagtactccttacgcgttgtgatccggaaccgcccc

SEQ ID NO: 31550 - DNA, 260 bp, Unknown
  Description of Unknown: RightRegion for integrase B5551 sequence
ccgccgggttcgtatttggacacgttaggggcaccaaaaaatagccttacggaaacgtaaggctattttcataatgattgccgctttgtggagtgctttcatttgccgctgacttctgtctaagtcagcggctctttttattttttaagagaaattcaagaacttttagtgtaagagaaacggtggcatatatgcagctgccaataaaagtaagcagcaaaattatttcctgaaaactcaagcgttcacctccctcataa

SEQ ID NO: 31551 - DNA, 260 bp, Unknown
  Description of Unknown: RightRegion for integrase B5552 sequence
gatatagagggagtaagatatcactcaaaagtcaaattggatgtttattttaaattttaagcgaggtgtttcaaaatgcaggaaaatgaaacttatgtaatctatttgagaaagtctcgtgcagatagcgaaaaatccagtttagaagaagtatttgcaaaacacgaatcagaactccagtcactcgctgaacgcactttaggcaatcgtattcctgaagataaaatctttcgagaggttgtatctggcgaaacaatcac

SEQ ID NO: 31552 - DNA, 260 bp, Unknown
  Description of Unknown: RightRegion for integrase B5553 sequence
accctgattgaatctattcatgttggacacggcaaagttaaaattgcatggaaaatttgatgtggtagtctgattgttttgctttgccatgcagaagttccgtcctcaagggcatgaaataggtcttccagtattgaagattaaggaactccgccaaggttcatgtgatgatagcagtgaactctgctccttgagaatcaaacctgaatacatcattcacgatggcgatgtcatcttctcttggtctggaagtctacttg

SEQ ID NO: 31553 - DNA, 260 bp, Unknown
  Description of Unknown: RightRegion for integrase B5554 sequence
acgaaaacagaatcgggaagccaaatcgaaccgcagctagagtacactttacgaatctgattcggcttccctctcttttaaagctataaggtagcattgagaatccgatttatcggatacccaatgctaccagagaacgaaagcccatcgtttgaggggcttttctcgatgtttcgagtgaagcctatgctgttctcttccacatgtagacggtcaaatacgggggcatgttgtcgtacgccttgttcccgccagtgtac

SEQ ID NO: 31554 - DNA, 260 bp, Unknown
  Description of Unknown: RightRegion for integrase B5555 sequence
accctgattgaatctattcatgttggacacggcaaagttaaaattgcatggaaaatttgatgtggtagtctgattgttttgctaaagctatacaatcaacatacaacatcttttacgcctcgtgaaatcactcaatccggggcgcatacatagaaatgttcgtttataagaccgctgcttaaattaaacaacgctgttataagtgaacattcaaggatggacattcataataggcaataacctcatctcaaagtgaacgc

SEQ ID NO: 31555 - DNA, 260 bp, Unknown
  Description of Unknown: RightRegion for integrase B5556 sequence
aaaattatagattctataacttgggatggtacagatggtatagatataaatttaaaataaaaacacgcttttctgcgtgtttttttactgtttttttgtatgtattgcacatcctgcccatcctccaccaacaactactaccttcatattaatctcctcccctcaaaaatacctcttggactagcttgtactttacagaatctctttactctatgacctgaaaatctagctgtacaacttccacatacaccttcaccaca

SEQ ID NO: 31556 - DNA, 260 bp, Unknown
  Description of Unknown: RightRegion for integrase B5557 sequence
aaagcggagggtttgtttttggatggggttgcttcaccaactaaatatgcgtatttttaaattaaaaaatcgcatgaaaaaaagccgtagatacgttaaacagcgtatttacggcttttctgttttctcagaaatatgcacttttgttcagcgaggggtagaaactgatgatatccgacgcattttgtgtctcagaaaactgaaatcgtctattcacaaaaaagtgcgacagtgcgacagaaacgctttcctgactttcc

SEQ ID NO: 31557 - DNA, 260 bp, Unknown
  Description of Unknown: RightRegion for integrase B5558 sequence
accctgattgaatctattcatgttggacacggtaaagttaaaattgcatggaaaatttgatgtggtagtctgattgttttgctttctcaaatgacaatacaatgaacaacagcattttgactactaccaagaaatgtttgatgtttatcaagaaatacttgattgatatccatagatattgtataatgttgttcatggaggtgattcctaatgagtataagttacaataagctctggaaactgcttattgattgcaatat

SEQ ID NO: 31558 - DNA, 260 bp, Unknown
  Description of Unknown: RightRegion for integrase B5559 sequence
tttaaagaaaaaaacaaaaggaacgctaagtttgaattagatataaaattaaaaatataaatgtcatcatcatacggattattgaacatctgtatgatgatgacattaaggaataatatagtataaatggataatattaaattaaatgttaaatatgtgttaaatatgaaaggacatgcaatttttaaccagtgatttgcatacactatatcaagtgtatttgataagtgaaacgttctaaacttgtttagatatttaat

SEQ ID NO: 31559 - DNA, 260 bp, Unknown
  Description of Unknown: RightRegion for integrase B5560 sequence
acgaaaacagaatcgggaagccatatcgaaccgcagctagagtacactctgcgaatctgattcggcttccctctcttttaaagctataaggtagcatggagaatccgatttatctgatacccaatgatgccagagaacgaaagcccctcgtttgaggggcttttctcgatgtttcacgtgagatctatgctgttcgccgccacatgtacacagccaggtatgggggaaggttgttgtgcggctggtttccgcccgcgtac

SEQ ID NO: 31560 - DNA, 260 bp, Unknown
  Description of Unknown: RightRegion for integrase B5561 sequence
aagattataggctctataacttgggatggtgctgatggaatagatataaatttaaaataaaaaggagaacgttaagtctcctttttctatcgtattaattctaataaatcgtaatagtaatactttttatttcttgctttattatctgaaaatataacttttttatcttctaattgatttaaatatcttcttattgttgttatattaattccagtcatttcactcattagtttagcattaaatattggtctttcaaacat

SEQ ID NO: 31561 - DNA, 260 bp, Unknown; identical to SEQ ID NO: 31560
  Description of Unknown: RightRegion for integrase B5562 sequence

SEQ ID NO: 31562 - DNA, 260 bp, Unknown
  Description of Unknown: RightRegion for integrase B5563 sequence
accctgattgaatctattcatgttggacacggtaaagttaaaattgcatggaaaatctgatgtggtagtctgattgttttgccttaacaatcccgttaatatgaacgactcttccggaagttggcccaaatggttggaaaaagtcgcaaaagtagttgctgtggctgctatagttgtaaccgccgcgattgtagtcgcggttgctacagcgggcacggggggactagggtcggctgctgccggagttgcatttggaacag

SEQ ID NO: 31563 - DNA, 135 bp, Unknown
  Description of Unknown: RightRegion for integrase B5564 sequence
gaggccctgggcgaagggttcgacaagcgctcttccggctccaccataagtccaccgtaattttgatagaattacggtggactttttgtataaagaaaaccaccggcaatgccggtggttccaaaaagctttagc

SEQ ID NO: 31564 - DNA, 260 bp, Unknown
  Description of Unknown: RightRegion for integrase B5565 sequence
accctgattgcatctattcatgttggacacggcaaagttaaaattgcatggaaaatttgatgtggtagtctgattgttttgctttagctatacaatcaacatacaacatcttttaagcctcgtgaaactactcaatccgaggcgcatacatagaaatgttcgtttataagaccgctgtttagattaaacaacgctgttataagtgaacattcaaaagctgaatttataatggacagttaaacaacctaaaagcgaacgca

SEQ ID NO: 31565 - DNA, 137 bp, Unknown
  Description of Unknown: RightRegion for integrase B5566 sequence
accctgattgaatctattcatgttggacacggtaaagttaaaattgcatggaaaatttgatgtggtagtctgattgttttgctttacctaccaaaagagtgaaagaaggggtgtcatgtcgcgcattattgagttta

SEQ ID NO: 31566 - DNA, 116 bp, Unknown
  Description of Unknown: RightRegion for integrase B5567 sequence
accctgattgaatctattcatgttggacacggcaaagttaaaattgcatggaaaatttgatgtggtagtctgattgttttgctttgtccagagtaccaacaagataaccggttatg

SEQ ID NO: 31567 - DNA, 109 bp, Unknown
  Description of Unknown: RightRegion for integrase B5568 sequence
gcggcggctggtgaactgtccaaaaagttcgcacaaggtcacgtcgcctccaccaaatgaaaaaatccctctgagcatttgctcagggggattttttcatctggcggcc

SEQ ID NO: 31568 - DNA, 109 bp, Unknown
  Description of Unknown: RightRegion for integrase B5569 sequence
tccaccaatagttacaagcaggtagagaagtgtctctacctgcttttttattacatatagataccgcggagaatcgaactctgcgcagggcgcgggcgtaaagaaaacg

SEQ ID NO: 31569 - DNA, 260 bp, Unknown
  Description of Unknown: RightRegion for integrase B5570 sequence
gccatcgctccagttttttatggaatccgcgtgtcggattccattttttgttgccgttgatttgctgcagggctgcgcctataatatagaaagaacaatcaccgaggaggacattatggatatcaaacaactggagcaatatctgatgcagagcgatcttggcatcgacgcaaaacagctcgagcgttttctctcagaatgcgacctcgacgacaagggttttccgccggaggagcttgtcagctacatccgccgccaga

SEQ ID NO: 31570 - DNA, 260 bp, Unknown
  Description of Unknown: RightRegion for integrase B5571 sequence
agaaagcatgaaagcggcagcgacatcgagcctgaactggatttcaggctcttgatttaatccgtctgcaagcatcgagtatctgatttatcggaaacccaatgcgtacagaaacacaagatgcagtagcgtcttggctgccatatgcaacatatagggggaaaccgcttggtttcccccttttttcgctcgaaatgcccctacacccactagggcctgccatttctaacgccttagaacgcttctcagcaagccgttta

SEQ ID NO: 31571 - DNA, 260 bp, Unknown
  Description of Unknown: RightRegion for integrase B5572 sequence
gagttgccgagcaccacgtgcttgttgccggagcgctcgatccacatgtggatctggtaggggtcgccgtccttcatggccttgaacaccgaggggatgtgcgccatgtcccagcacaagatgcccttgtgctcgatggtgccgcagcgcttcatgaccttctccttggagagcaggcggggcgtgttgcccagctggtccttgcagggggccggcgcgaacttctgcagcatggtgccgggcttctccacattgcccat

SEQ ID NO: 31572 - DNA, 260 bp, Unknown
  Description of Unknown: RightRegion for integrase B5573 sequence
accctgattgaatctattcatgttggacacggcaaagttaaaattgcatggaaaatttgatgtggtagtctgattgttttgctttaccattagtaacatcggttatagccgccccctgaatttctccagatgtccgatcaattcctgaatatctgctttcagcgcagcagaatccggcgcggtgaatgtggccgcgccaaggacaatgtagtcgatggatacgccgaacaggtttgagagcgcgatcagcacatcgaccg

SEQ ID NO: 31573 - DNA, 260 bp, Unknown
  Description of Unknown: RightRegion for integrase B5574 sequence
gataaccgaacaagaaatgatgattccccttttactatcaaaatcattcttaatctttaattccatcatcaatgtgctaattcttcagtacctacattgtgctcagaaatgttccaaattaagccttatgcggacaagcccagtgctttcggattatttgtacatagctttgtaagctatgaaaggattggcaagtgggatgaggacagatacaggaaaggtggcagaaagccttattttatcgaactttgcggcactcc

SEQ ID NO: 31574 - DNA, 260 bp, Unknown
  Description of Unknown: RightRegion for integrase B5575 sequence
tttaaagaaaaagacaaaaggaacgctaagtttgaattagatataaaattaaaaatataaatgtcatcatcatacagatgttcaataatccgtatgatgatgacattaaggaataatatagtataaatggataatattaaattaaatgttaaatatgtgttaaatattctataaaaggaatattctacatattaaaaatcatatatttcattaagacttttgaaaattaagaaagttgagatgaaataatttaggcatat

SEQ ID NO: 31575 - DNA, 260 bp, Unknown
  Description of Unknown: RightRegion for integrase B5576 sequence
gctccctctgcgctggggagccaagcaattctaagcactaaccatcgagaaaaggtatagagagtgatatttgtgaatctcttcctttgaacgatggttagtgtcgttttatacagttttattgtatttatttgaagtatggaaggttaagcctccgtatgcgtacattttgtatgcgtacggaggcttttttgttgctcccaaaaaggagactaaaaatggctacagattatattaaccgtcctaatatggaaaattat

SEQ ID NO: 31576 - DNA, 260 bp, Unknown
  Description of Unknown: RightRegion for integrase B5577 sequence
accctaattgaatctattcatgttggacacggtaaagttaaaattgcatggaaaatttgatgtggtagtctgattgttttgctttctcaaataataaaaaaatttatttgtactatcgtgatggctacgatggcggaaaaaatgcactaggaggattcttaaattcggaaattggagtcatttcgatgggaataggcataggtgtagatgaagtagatattattgctcatgaatttacccattttgtttccagaagtatt

SEQ ID NO: 31577 - DNA, 109 bp, Unknown
  Description of Unknown: RightRegion for integrase B5578 sequence
aaaattatagattgtatagtttgggatggagctgatgggttaaatataaatttaaaataaaaaaacacgcttttttgcgtgtttttttgatgtctttttaaatgtactg

SEQ ID NO: 31578 - DNA, 260 bp, Unknown
  Description of Unknown: RightRegion for integrase B5579 sequence
ccaaaaaaagagataccaaatgaaaggtatctctttttatttagtatgcacaagacttgaacttgcggcaggcttctccgaattcgacgagctaaagcgaagtgcgaatttgggagaaacagtccggtggactgtttcgtagaaggctagttcagttctgtgtcacctcgaccaaaaggactacctaatggtagtccttattttttacccaaaatagcaaacagccgcataaaatagcggttttcttttatcaggtgttc

SEQ ID NO: 31579 - DNA, 260 bp, Unknown
  Description of Unknown: RightRegion for integrase B5580 sequence
accctaattgaatctattcatgttggacacggtaaagttaaaattgcatggaaaatttgatgtggtagtctgattgttttgctttaatgagttaaagacacttttttactcaattcgagaagagcgcgaagagtatcgtcagaggttaggtgagtacttttatatcgcgagcaatctttcctttatatatatcgataatatcgatcaaatgcttaaacgctgtgatatgatgagagaaaagagcgttttactgattggaa

SEQ ID NO: 31580 - DNA, 260 bp, Unknown; identical to SEQ ID NO: 31512
  Description of Unknown: RightRegion for integrase B5581 sequence

SEQ ID NO: 31581 - DNA, 260 bp, Unknown
  Description of Unknown: RightRegion for integrase B5582 sequence
attaatcaattgattactagtatagaaatatccgataatgataaaactcttatattttagggccttttaggctcttttttactgttattttagatgtatagcacaccctgaccaacctcccccaacaactactaccttcatattaatctcctcccctcaaaaatacctcttggactagcttgtactttacaaaatctctttactctatgacctgaaaatctagctgtacaacttccacatacaccttctccacagcacat

SEQ ID NO: 31582 - DNA, 260 bp, Unknown
  Description of Unknown: RightRegion for integrase B5583 sequence
accctgattgaatctattcatgttggacacggtaaagttaaaattgcatggaaaatctgatgtggtagtctgattgttttgctttagctatacaatcaacatacaacatcttttaagcctcgtgaaactactcaatacgaggcgcatacatagaaatgttcgtttataagaccgctgtttagattaaacaacgctgttataagtgaacattcaaaagctgaatttataatggacagttaaacaatttcaaagcgaacgca

SEQ ID NO: 31583 - DNA, 260 bp, Unknown
  Description of Unknown: RightRegion for integrase B5584 sequence
ttggattgctttactgcaccaagcaaaatcccacgattgaccgttgaaaatgcggtataaatcgtgggatttcttgttttacaacgaccccgaaacggctggaatgtgccttgtttgtgccttgctgccccaaaaactgccttgccgtgtccttacagagtgccttatgctggatgcccggcgggttattcttcagcggcttgctgctcgtagtcgtccagccacgccctcacggtttcaaggttcatcggaggcgggac

SEQ ID NO: 31584 - DNA, 260 bp, Unknown
  Description of Unknown: RightRegion for integrase B5585 sequence
gctccctctgcgctggggagccaagcaattctaagcactaaccatcgagaaaaggtatagagagtgatatttgtgaatctcttcctttgaacgatggttagtgtcgttttatacagttttattgtatttatttgaaatatggaaggtcaagcctccgtatgcgtacattttgtatgcgtacggaggctttttttgttgctccgaaaaggagactaaaaatggaaaattatataatagatgatattcttaaaatacttagt

SEQ ID NO: 31585 - DNA, 260 bp, Unknown
  Description of Unknown: RightRegion for integrase B5586 sequence
accctgattgcatctattcatgttggacacggcaaagttaaaattgcatggaaaatttgatgtggtagtctgattgttttgctttatccagatgatgaccaagctcgtgtgcgacggtgggaaggtcgtttgctatcctcgtttttatgctgtgggcgtgggtgttgtactgcccgagcacatcacgccgagacatacgcccagttccgacaggtatgccgaagtcgtggcgcatcttcccgatgatgtcagatatacgc

SEQ ID NO: 31586 - DNA, 260 bp, Unknown
  Description of Unknown: RightRegion for integrase B5587 sequence
accctgattgaatctattcatgttggacacggtaaagttaaaattgcatggaaaatttgatgtggtagtctgattgttttgctttaacgttgcttaattcttgatccgtttctgaatatcctcaatagacggtagctgcttgctcaaattctccggcaggctgcttgtaatcttgtattcgctgacgccgatgggcttggacatatccttcaaagcgtattcggcaacgaggtcgttcttgctcttacaaagcagcagtc

SEQ ID NO: 31587 - DNA, 260 bp, Unknown
  Description of Unknown: RightRegion for integrase B5588 sequence
accctgattgaatctattcatgttggacacggtaaagttaaaattgcatggaaaatttgatgtggtagtctgattgttttgctttagctatacaatcaacatacaacatcttttaagcctcgtgaaactactcaatccgaggcacatacatagaaatgttcgtttataagaccgctgtttagattaaccaacgctgttataagtgaacattcaaaagctgaatttataatggacagtttaacaacctaaaagcaaacgca

SEQ ID NO: 31588 - DNA, 260 bp, Unknown
  Description of Unknown: RightRegion for integrase B5589 sequence
actctgattgaatctgttcatgttggacacggtaaagttaaaattgcatggaaaatttgatgtggtagtctgattgttttgctttaccaaatcctcctccggtacatggggtgctactacaaccataagcgtatctcgactcaagagcacgggagcgacaaaaatcaaggtaacccctgttaacgctaatcagcaggttagcggaggcaccctctatttcagatcaaccggtacaaagtactcaagcatgaccaacacaa

SEQ ID NO: 31589 - DNA, 109 bp, Unknown
  Description of Unknown: RightRegion for integrase B5590 sequence
ttaatcagaaagattattttaaccgggaatgatgttgtaatagaatgggcttttatttaacccattttttatgatacaaatcgaatcacgaatataagctattacgtgg

SEQ ID NO: 31590 - DNA, 260 bp, Unknown
  Description of Unknown: RightRegion for integrase B5591 sequence
tgttcactggacattcatttcagaatttccgctgaacagttccttggaaaagcagcctaacgcaaatgtcgacagctcccattggaaagaatgatataatcaatcaagccaatcatccgagtgaggtggttggctattttaatgggaggattgaatatgaaacgagtctattgtctttaccgcgtttctacagttggacaggtggatcatgacgatatccctttgcagcgaatttcgtgccggcaatatgcgcagcagaa

SEQ ID NO: 31591 - DNA, 85 bp, Unknown
  Description of Unknown: RightRegion for integrase B5592 sequence
accctgattgcatctattcatgttggacacggcaaagttaaaattgcatggaaaatttgatgtggtagtctgattgttttgcttt

SEQ ID NO: 31592 - DNA, 260 bp, Unknown
  Description of Unknown: RightRegion for integrase B5593 sequence
tgcgaacttacaattcttacaccgtcattgcttgctatctccaatattttcaaaaaatagtatagcacattttctttcgattgtcaacaaaaaaccggcagtacaacccaggaaatctcctgctgtactgccggttttctcatttcagcttcttgtcaatgctcgcaacatgctgcaaaatctgttccaacgtgccgctttccgtggaaatgccgctgctgtcggcatcacctgccgcagctgcacctaacttgccgtag

SEQ ID NO: 31593 - DNA, 260 bp, Unknown
  Description of Unknown: RightRegion for integrase B5594 sequence
tttaaagaaaaaaacaaaaggaatgctaagtttgaattagatataaaattaaaaatataaatgtcatcatcatacggattattgaacatctgtatgatgatgacattaaggaataatatagtataaatggataatattaaattaaatgttaaatatgtgttaaatatgaaaggacatgcaatttttaaccagtgatttgcatacactatatcaagtgtatttgataagtgaaacgttctaaacttgtttagatatttaat

SEQ ID NO: 31594 - DNA, 260 bp, Unknown
  Description of Unknown: RightRegion for integrase B5595 sequence
accctgattgaatctattcatgttggacacggtaaagttaaaattgcatggaaaatttgatgtggtagtctgattgttttgctaattgacctcattatatgtcctattatgtattattgtcaataggtattttggtgctcatagaaataaaaaccccgctcctgttttagcgaggtttttaataagctatatttacatatattactatatgttatttattgtgcttgcggaacagataccatgacggcattctatatttt

SEQ ID NO: 31595 - DNA, 260 bp, Unknown
  Description of Unknown: RightRegion for integrase B5596 sequence
accctgattgaatctattcatgttggacacggtaaagttaaaattgcatggaaaatctgatgtggtagtctgattgttttgctttaccaatgcaatatctaattttgtggatttcaaaatattactcataatcgtcacctttcttgcttgtaaacactacaatttcatcaatggtggcaggctcaatagtcaggttggagaaaccgttaatatcttcggttttcatcagtgcctcaaatcccgtagggaatgtacgaata

SEQ ID NO: 31596 - DNA, 260 bp, Unknown
  Description of Unknown: RightRegion for integrase B5597 sequence
tttaaagaaaaaaacaaaaggaatgctaagtttgaattagatataaaattaaaaatataaatgttatcatcatacagatgttcaataatccgtatgatgatgacattaaggaataatatagtataaatggataatattaaattaaatgttaaatatgtgttaaatatgaaaggacatgcaatttttaaccagtgtttcgcatacactatatcaagtgtatttgataagtgaaacgttctaaacttgtttagatatttaat

SEQ ID NO: 31597 - DNA, 260 bp, Unknown
  Description of Unknown: RightRegion for integrase B5598 sequence
gacggtaggttatcggattacgcttccaatactccacaatggaagaaccgccgcccataaacaccattttggtcagatccagattataatggtttgcctgtatgataccataaatttcctctgcgtaggacttcaaacagttttttatgacgtcctgatactgcttcgggcagtcatagcttcctgtcctcataaatgcttctgtaatatatgccggtacccctgcccctgttttggcaatggcttcctcattgactttt

SEQ ID NO: 31598 - DNA, 260 bp, Unknown
  Description of Unknown: RightRegion for integrase B5599 sequence
agctccaccataagtaacaggcaggtagatactcatatctacctgcctttttatttctagtccgtaccgcggagaatcgaactctgtgcagggcgcgggcgtaaagaaaacgcgtaagcgtttttagcccgcgggcgaggacgccggcaggcggccgaagccggtgcggatttgcgaagcaaatacgcggattctccgcgcaatgcctcgactagatatagacgcgatgccgatcgcgctgcagcctgccgtgccccgca

SEQ ID NO: 31599 - DNA, 260 bp, Unknown
  Description of Unknown: RightRegion for integrase B5600 sequence
atatttaaaaagattgtttatgatcctaaaacagatacctttgaatattactttaaataacggactttggttcgttatttttttgtttaaattaaaagtattgcacaaccactattattaatttatatactaaattattctgtttaatttttaaatattaactagaaacgagaggattcctttttgtaaattagtatatttccttattaagttccattctcttactataataaccaattaatattgatttaacaatattg

SEQ ID NO: 31600 - DNA, 260 bp, Unknown
  Description of Unknown: RightRegion for integrase B5601 sequence
ttgatgattaccaccatagccgctacaagcgacagcttgaacatcacatggaaaatctgacgggcggaacccctcccgtcagaccgttaccctgtgtagtcccttgtaaactgtactttcggtaagactactgcaaacatgtcggagatggagaaggttgccctgcggtatcagttcgtgcagaatcagctggcaacggcagcaggagacttttccagaacttcggacggttgggcaaaccaggtgcgcattctgcagct

SEQ ID NO: 31601 - DNA, 109 bp, Unknown
  Description of Unknown: RightRegion for integrase B5602 sequence
atatttaaagaaataacttatgatcctaaagaggatacatttgaattctcatttaaatagcggacttttgttcgttatttttttggtttaaattgaaagtgtaggacat

SEQ ID NO: 31602 - DNA, 260 bp, Unknown
  Description of Unknown: RightRegion for integrase B5603 sequence
ttaatgctcactaccatagccgccacaagcgatagcttgaatatcacatggaaaatctgacgggcggcacacctcccgtcagatacctaccctgtgtagtcccttgtaaactgtactttccataaattcaaaactcagcagaatagcggctctgtcaacgtcccgcggcatgctctgcagcagctgcggcagcagcctgcgcgcccccacgtgcaggacctgcatcataagcttcaggcacgccgatacatcgttgttaa

SEQ ID NO: 31603 - DNA, 260 bp, Unknown
  Description of Unknown: RightRegion for integrase B5604 sequence
gaggaggccctgggcgaagggttcgacaagcgctcttccggctccaccaaaacaatataatccgaaccttttgccgattggtcatgggttcggatttattgtttctgttgaggaaattgaagactggtagctttgtctcgattcttgacacaatgcttgctgaacagccgtctgctcaaggtgttcttagggtgtatctgaaaactcccaacgcacccggacagcgggcctttttgcggtgcgccgcgtcatttttcctt

SEQ ID NO: 31604 - DNA, 260 bp, Unknown
  Description of Unknown: RightRegion for integrase B5605 sequence
gacggaatcacctatgataaggagaaaaaccggctgtattttaactttttcatttcatgaaaaaacgccgggaagccccattttataagggtttccggcgatttgtagggtattgcaatcggggccaccgtattgtgttgcaataatcttcgcgatccgtgcatccgttttcgtgatatttaccggatattgcaatcgtttttcatatatccacatacactaacacctgcctttcccggatctttcccatggccatggct

SEQ ID NO: 31605 - DNA, 100 bp, Unknown
  Description of Unknown: RightRegion for integrase B5606 sequence
aaccccgtcaacaaaatgttgacagggtgttcgagtagcattgctatggtgacccggtagggattcgaaccctagacctactgattcgtagtcagtcact

SEQ ID NO: 31606 - DNA, 260 bp, Unknown
  Description of Unknown: RightRegion for integrase B5607 sequence
gctttaattgaatccgtgcgtgtcaatcaggatactgttgacatcgtgtggaagatataaaaagcgttgtatgctgattgttttgttaagccttttttaataaagctttcaatatcgtttgtgcacggtatcggattattgattattccgctctcatagaagctgtaatcggagagagcgtcgataatcgggaaatcctcgagcaggggagcaacggcgctttttgccattgagtagctttcgatttggtcttcgttcgg

SEQ ID NO: 31607 - DNA, 88 bp, Unknown
  Description of Unknown: RightRegion for integrase B5608 sequence
gacaaaatacaagtggcgttgttggtgacccaggagagattcgaactcccgacaccttgattcgtagtcaagtgctctatccagctga

SEQ ID NO: 31608 - DNA, 109 bp, Unknown
  Description of Unknown: RightRegion for integrase B5609 sequence
agctccaccataagtaacaggcaggtagatattcgtatctacctgtctttttatttctagtccgtaccgcggagaatcgaactctatgcagggcgcgggcgttaagcaa

SEQ ID NO: 31609 - DNA, 260 bp, Unknown
  Description of Unknown: RightRegion for integrase B5610 sequence
ggaaaaagaaacggtaaaggagtgtataattttaagttgaatatttatttaaagatatagcgtttttttctatatctttttatttctatcatttacgagctaacgaacttgctcatgttgaaattattagtacccttttctatcaacttaccaatggtctaacacctcaagaaattaaagaaggtggattagatgcctattttactgatcatacattaggtgtctatccaacaaatagtgcgggtattccttttagtgcc

SEQ ID NO: 31610 - DNA, 260 bp, Unknown
  Description of Unknown: RightRegion for integrase B5611 sequence
agctccaccataggtaacaggcaggtagagaagtgtctctacctgcctttttatttctagtccgcaccgcggagaatcgaactctgtgcagggcgcgggcgtaaagaaaacgcgtaagcgtttttagcccgcgggcgagggcggcggcagccgaccgaagccggtgcggatttgcgaagcaaatacgcggattctccgcgcaaacttccgactcaaaacggatgcgatgtttatcgaatttcagccggccatgcgccgcg

SEQ ID NO: 31611 - DNA, 260 bp, Unknown
  Description of Unknown: RightRegion for integrase B5612 sequence
aatggttgcggggacacgcaactcataatatgtacattgaaattttttataaaaaaataaattttttcaaaaaaactattgacataccacccaatgggtggtataataaagacaagaaatgagggaaacctcaaaataataaccaaaagcaataaattttaggaggaaaagaaaatgaagagatttaaggtaacaaacgaaatgtacaaaaacggtaatgtagtagatgcaagtcgtgataattacgcaggcgattatgt

SEQ ID NO: 31612 - DNA, 260 bp, Unknown
  Description of Unknown: RightRegion for integrase B5613 sequence
aactttcaaaaactttttatgggaaaaagaacaaccgtgttccgtattttgagacgctaacagcaattttgaaaacaattctacttgaaatagaaaaatcatcgcctttaactaagcatatgccgaacaaatgtggtgtcgttaagaatgcgtctcgtagatctatattggcccgtagctcagatggtagagcgtctgactgttaatcagatggtcgcaggttcgagtcctgccgggtcagccatattgcggggtgtagc

SEQ ID NO: 31613 - DNA, 260 bp, Unknown
  Description of Unknown: RightRegion for integrase B5614 sequence
gatatagagggagtaagatatcactcaaaagtcaaattggatgtttattttaaattttaagcgaggtgtttcaaaatgcaggaaaatgaaacttatgtaatctatttgagaaagtctcgtgcagatagcgaaaaatctagtttagaagaagtatttgcaaaacacgaatcagaactccagtcactcgctgaacgtactttaggccatcgtatttctgaagataaaatctttcgagaggttgtatctggcgaaacaatcac

SEQ ID NO: 31614 - DNA, 75 bp, Unknown
  Description of Unknown: RightRegion for integrase B5615 sequence
gacaaaataaaagtggttttgttggtgacccaagagagattcgaactcccgacaccttgattcgtagtcaagtgc

SEQ ID NO: 31615 - DNA, 98 bp, Unknown
  Description of Unknown: RightRegion for integrase B5616 sequence
aagatccgtgtggaatactggttcgcggcctgccggtatgcatccgagcgcaccatctgaaagtatgcccgctcttcgcagcgggctttttgattgcc

SEQ ID NO: 31616 - DNA, 109 bp, Unknown
  Description of Unknown: RightRegion for integrase B5617 sequence
agctccaccatacgtaacaggcaggtagatattcgtatctacctgcctttttatttctagtccgcaccgcggagaatcgaactctgtgcagggcgcgggcgtaaagaaa

SEQ ID NO: 31617 - DNA, 260 bp, Unknown
  Description of Unknown: RightRegion for integrase B5618 sequence
aaaatccgcgtggagtattggttcgcgtcctgccggtactcatccgagcgcaccacttgaaatcatgcccgctcgttcgagcgggctttttgatgcaaaaagcagcctccctcgcgggcaggctgcctttttgtatcaggactccccgttctcgaggatgtcctgtatcttcgtcttcatgatgtcgaaggccacatcgttgaggccgctgttgatgacgatgtcggcgagattcttcgtcggctcgacgtagagatagt

SEQ ID NO: 31618 - DNA, 260 bp, Unknown
  Description of Unknown: RightRegion for integrase B5619 sequence
agctccaccataagtaccaggcaggtagatacttatatctacctgcctttttatttctagtccgtatcgcggagaatcgaactctatgcagggcgcgagcgttaagcaaacgcggagcgtttgtagcgagcgggcgaggacgccggcaggcggccgaagccggtgcgtatttgcgaagcaaatacgcggattctccgcgcaaagcctcgactagatatagacgcgatgccgatcgtactgcagcctgccgtgccccgcat

SEQ ID NO: 31619 - DNA, 98 bp, Unknown
  Description of Unknown: RightRegion for integrase B5620 sequence
aaccccgtcaacaaaatgttgacagggtgttcgagtagcattgctatggtgacccggtagggattcgaaccctagacctactgattcgtagtcagtca

SEQ ID NO: 31620 - DNA, 109 bp, Unknown
  Description of Unknown: RightRegion for integrase B5621 sequence
aaccccgtcaacaaaatgttgacagggtgttcgagtagcattgctatggtgacccggtagggattcgaaccctagacctactgattcgtagtcagtcactctatccagc

SEQ ID NO: 31621 - DNA, 260 bp, Unknown
  Description of Unknown: RightRegion for integrase B5622 sequence
aaagaaaagggctggaaaccaaaccaattcataattaaacttagatttaaaaattgttaattttatgtatacaaattgattaatgctgtgaacagcattaaataatttatatacattattttgcaaaataaaacaccccttaaaactgtaagcaaaacagcattaaggggtggaattaaattatttaactaaacgctcggaactattgtgtatcaggctcccatttgggcataacgataacggttttataagtgctgcac

SEQ ID NO: 31622 - DNA, 77 bp, Unknown
  Description of Unknown: RightRegion for integrase B5623 sequence
gacaaaataaaagtggttttgttggtgacccaagagagattcgaactcccgacaccttgattcgtagtcaagtgctc

SEQ ID NO: 31623 - DNA, 260 bp, Unknown
  Description of Unknown: RightRegion for integrase B5624 sequence
ggaaaaagaaacggtaaaggaatgtataattttaagttgaatatttatttaaagatatagagtttttttctatatctttttatttctatcatttacgagctaacgaacttgctcatgttgaaattattagtacccttttctatcaacttaccaatggtctaacacctcaagaaattaaagaaggtggattagatgcctattttactgatcatacattaggtgtctatccaacaaatagtgcgggtattccttttagtgcc

SEQ ID NO: 31624 - DNA, 260 bp, Unknown
  Description of Unknown: RightRegion for integrase B5625 sequence
gcactttccagcgcgtcggataggtgttcggataagcgcacgtcaagaccaccattatagtcacgattgcatatgcagtcgtgactttttctgtttatgataattcccatatctatacggtgttttagacaaaacgataatcatttatgtagtaaaaaatgcttcaatataaatcatataaccgtacacagaataacccaccatatacccaaaaactcccattccaatcggattttttagcggtgtgagtatgcatacgg

SEQ ID NO: 31625 - DNA, 109 bp, Unknown
  Description of Unknown: RightRegion for integrase B5626 sequence
ggaaaaagaaacggtaaaggaatgtataattttaagttgaatatttatttaaagatatagagtttttttctatatctttttatttctatcatttacgagctaacgaact

SEQ ID NO: 31626 - DNA, 239 bp, Unknown
  Description of Unknown: RightRegion for integrase B5627 sequence
gaggaggccctgggcgaagggttcgacaagcgctcttccggctccaccaaaacaatataatccgaaccttttgccgattggtcatgggttcggatttgttgtttctgttgaggaaattgaagactggtagctttgtctcgattcttgacacaatgcttgctgaacagccgtctgctcaaggtgttcttagggtgtatctgaaaactcccaacgcacccggacagcgggcctttttgcgg

SEQ ID NO: 31627 - DNA, 260 bp, Unknown
  Description of Unknown: RightRegion for integrase B5628 sequence
tactataaacctaaagaaagacttgctcaaatcactttggaagtgaaatttaaaatataattggtatccccatacggattattgtttgtcagtatgatgatacatgtagaattaccccataaaaacatctttattacattatataacaaaaggctaaggaaaataacttccctagccttattttattaataatagtggtattatagctgttgcaaataatactcctaatacaaagtatcctaatcttaataatatatcta

SEQ ID NO: 31628 - DNA, 260 bp, Unknown
  Description of Unknown: RightRegion for integrase B5629 sequence
atgcagcgttttgaagacggggaggagttcggatgccgtgcgtctcgctccaccaaatagtgcaaatccgaactcattctttttcgtgaagcactgtgtcggatttgttttcatagtagaggacgtaggttaaactgcgtcctcttttttaggtgtctcgtaagtaagagcctgtttggaatctccaatgccagcagtggtcgggtcagtcacgataccgagaatcgtgaggactgcgaacagggcatttacgactgcca

SEQ ID NO: 31629 - DNA, 260 bp, Unknown
  Description of Unknown: RightRegion for integrase B5630 sequence
aaaatcgaagtcaaatgcggcgaaatacaaatctattggaaatataattttgagttgtagtgagtattgggccttgagagcataccctcagcatctgtgcatgatctggcttggcaggaggcggtggagcatagtcagtcagcacagcttgctggacggacatctatcattcaataaattgatccggccaatcacaaacaattggccggatatagtgaaatgctttccttatatttatcttggccgttcctgcatccaac

SEQ ID NO: 31630 - DNA, 109 bp, Unknown; identical to SEQ ID NO: 31625
  Description of Unknown: RightRegion for integrase B5631 sequence

SEQ ID NO: 31631 - DNA, 260 bp, Unknown
  Description of Unknown: RightRegion for integrase B5632 sequence
atgcagcgttttgaagacggggaggagttcggatgccgtgcgtctcgctccaccagataagcccgatggttttgatacgaaaccatcgggctttttatttgcaatcagcatgatcatctgatataattaattcgaagtcggagtttgtggaggtgttttatgaaactattatttataatcggcgatactgctgttgggaaaatgacagttggtcaggaactaatgaaaataacggatttaaggctctttcacaatcacat

SEQ ID NO: 31632 - DNA, 260 bp, Unknown
  Description of Unknown: RightRegion for integrase B5633 sequence
gaggatgccctgggcgaagggttcgacaagcgctcttccggctccaccaaaacaatataatccgaaccttttgccgattggtcataggttcggatttgttgtttctgttgaggaaattgaagactggtagctttgtctcgattcttgacacaatgcttgctgaacagccgtctgctcaaggtgttcttagggtgtatctgaaaactcccaacgcacccggacagcgggcctttttgcggtgcgccgcgtcatttttcctt

SEQ ID NO: 31633 - DNA, 260 bp, Unknown
  Description of Unknown: RightRegion for integrase B5634 sequence
gtgcacgtcacggcctggggtttcgtcgcggcggtgcgcctgcctatgcttggggcatgatctcctgctcgccgtcctcgtccatgtacggcatgaggaacacgccgccctgctcggtggtaagcagcaggtactcgcggttgtgctcgtcgcacacgatttcctggccgatgccctcgggcaggtcgtatatggggccgtccgtgcgggcttgcctcacggtcacgtcttgcgctcccatggcctgcgacgcgcagctg

SEQ ID NO: 31634 - DNA, 94 bp, Unknown
  Description of Unknown: RightRegion for integrase B5635 sequence
agacctgaccaaagaaataatgactttaaagtggttatatcccctaaattactgcgttaggcaattacatacaacatgcctaacgcaattcatt

SEQ ID NO: 31635 - DNA, 260 bp, Unknown
  Description of Unknown: RightRegion for integrase B5636 sequence
gaggaggccctgggcgaagggttcgacaagcgctcttccggctccaccaaaacaatataatccgaaccttttgccgattggtcatgggttcggatttgttgtttctgctgaggaaattgaagactggtagctttgtctcgattcttgacacaatgcttgctgaacagccgtctgctcaaggtgttcttatcgttcgacgcaacagagatgttgcaaaaggaactggtgcattgctgtctccgaatgattggagtttggga

SEQ ID NO: 31636 - DNA, 260 bp, Unknown
  Description of Unknown: RightRegion for integrase B5637 sequence
aacaccttgtttttcgtaaaacattgtttcgggtttgtgatgataatagaggaagtctgacttgcgtcaggcttcctcttttttcccgttgaagtagttaaagtagttgttcttggctttttgcgtgtaacttttgctaaatacgcgcgtattaagagaaagtttacgcaaaaactgattttccactactttaactacttctccatttgcttcaactgcaacacggcagactcaataaggttctcaatttcagccgtatt

SEQ ID NO: 31637 - DNA, 109 bp, Unknown
  Description of Unknown: RightRegion for integrase B5638 sequence
agctccaccataagtaacaggcaggtagatattcgtatctacctgcctttttatttctagtccgcaccgcggagaatcgaactctgtgcagggcgcgagcgttaaacaa

SEQ ID NO: 31638 - DNA, 260 bp, Unknown
  Description of Unknown: RightRegion for integrase B5639 sequence
gatatagagggagtaagatatcactcaaaagtcaaattagatgtttattttaaattttaagcgaggtgtttcagatgcaagaaaatgaaacttatgtaatctatttgagaaagtctcgtgcagatagcgaaaaatttagtttagaagaagtatttgcaaaacatgaatcagaactccagtcactcgcagaacgtactttgggtaatcgtattcctgtggataaaatctttcgagaggtcgtatctggcgaaacaatcaca

SEQ ID NO: 31639 - DNA, 260 bp, Unknown
  Description of Unknown: RightRegion for integrase B5640 sequence
agaacatacggaagaggagaaacgtacagtgtagtgaccggcgatgttgtacggatataggggatcattccgggaatgattccggtaccgaagaattggttccgccatgatgtcaatgataaataagcaaaaaaggaagcacacctgaagaattccaggtgtgctttaaagttatttgccggttgttctgctttttgtacgcggcgggtcattcggtacccactctataatctcagacggttggcaatgtaacgcctcac

SEQ ID NO: 31640 - DNA, 260 bp, Unknown
  Description of Unknown: RightRegion for integrase B5641 sequence
gaggaggccctgggcgaagggttcgacaagcgctcttccggctccaccattgaagtataatccgaacaccctattctttatagggacactgttcggacaaacaacaaaacaccgagtagagtaacaagctctgcccggtgttttgttgttggtgggtagagcgggtagagaaaaatcgcaatttcccataaactctcttatagtagctctcttatagactactttatgaaaaatacagatttactctacccactctaccc

SEQ ID NO: 31641 - DNA, 77 bp, Unknown; identical to SEQ ID NO: 31622
  Description of Unknown: RightRegion for integrase B5642 sequence

SEQ ID NO: 31642 - DNA, 260 bp, Unknown
  Description of Unknown: RightRegion for integrase B5643 sequence
atatttaaagaaataacttatgatcctaaagaggatacatttgaattctcatttaaatagcggacttttgttcgttatttttttggtttaaattgaaagtgtaggacatccacctctaatataaccagtatatttagttatatccttaacatgtatcatttcaactttcttttctcctgctacctttgctgcttttttcaaatctaactcttctgcaactggaattacaaaaacataaaattccttagataacccttgag

SEQ ID NO: 31643 - DNA, 260 bp, Unknown
  Description of Unknown: RightRegion for integrase B5644 sequence
cttcctgaacagcgaaatgacgaatttgagcttattatttattcaaaattattaacttaaaaaaattaccctacatataacatatgtagggtaattcattcccttatatatgttatatgttatttctttttactctttttattttctattttctcgatcacttctaaaaaagtattgatatattccttcatctgcaatctccttctcattaataattagttataataagttctttatattttcctcttcccttctcatct

SEQ ID NO: 31644 - DNA, 109 bp, Unknown
  Description of Unknown: RightRegion for integrase B5645 sequence
agctccaccaatagttacaggcaggtagatacttatatctacctgcctttttatttctagtctgtaccgcggagaatcgaactctgtgcagggcgcgggcgtaaagaaa

SEQ ID NO: 31645 - DNA, 72 bp, Unknown
  Description of Unknown: RightRegion for integrase B5646 sequence
gacaaaataaaagtggttttgttggtgacccaagagagattcgaactcccgacaccttgattcgtagtcaag

SEQ ID NO: 31646 - DNA, 260 bp, Unknown; identical to SEQ ID NO: 31631
  Description of Unknown: RightRegion for integrase B5647 sequence

SEQ ID NO: 31647 - DNA, 260 bp, Unknown
  Description of Unknown: RightRegion for integrase B5648 sequence
aaagaccatacaatcattatagaattaaagaatggtatgttgcttgaagaggctttgtaaccgtattgaaatcgaaacggttaaactggtcgaattcgaccggattagaataaatatagcatatttttagaaaaaagcgcgttttggcggcataaaaccattgacataatatattttatcggatataatgatatgatttagcggaataaccgctatttggcaggtatgggataagaggagatgttttatgcatgattttt

SEQ ID NO: 31648 - DNA, 260 bp, Unknown
  Description of Unknown: RightRegion for integrase B5649 sequence
actcgaactcgcgagcccttcgtcgctgatgggtatattatactgcccattgccatataaagcaaaagaagcccggcacgatgccgggcttctctctttagtcttccatgtatttgccagcgatccagagcgcgaccgttccggcgcccagcggaccgatggccacgatggcgatcagtatggccacaatcagcacttccatggtgtcctccttagctgagcagcttgttgaccttggcctgcacccgggcgtagtcata

SEQ ID NO: 31649 - DNA, 260 bp, Unknown
  Description of Unknown: RightRegion for integrase B5650 sequence
gctttaatcaaagttatcaaggtggcaaacgggaatattgaaatcgtatggaaaatctaaggcggttttatccgctatcatttttgaggtaaatctacttcaatcttcccgtttcggtgaaaccctccgaatcacccaggaaaaactggacagccgcaatttctatgcctttaatccggcctttgatccggatcaggcgccccagccccgataagcagcccttaatccagctgtatccggactccgccaaggagctttac

SEQ ID NO: 31650 - DNA, 260 bp, Unknown
  Description of Unknown: RightRegion for integrase B5651 sequence
aataaggacggaaatgtgcgtataatcctgaaaaagctcgatgatttggatatactttaattgctttacctatttggtgcggatagtagaaataaccgcccacaattagataggtagaatcaaccaaaaccaacctatatcacataaggggacaagccatttttaccgcttgttccctttttatatcccgattacccgcctaaatgtaaaagtatagccatctggtattccatggtgtgaagatattccaagcgctgtat

SEQ ID NO: 31651 - DNA, 109 bp, Unknown
  Description of Unknown: RightRegion for integrase B5652 sequence
gacaaaatattaataagagatgacgaaattgatatacagtggaaagtgtttaatcaataatattttctataattctccctttacttccatagctataggtgattctgta

SEQ ID NO: 31652 - DNA, 260 bp, Unknown
  Description of Unknown: RightRegion for integrase B5653 sequence
atatttaaaaagattgtttatgaccctgaaacaaatgatttagatgttacctttatgtgacatctttttgtctaaataaactgtggtgaacatccacctatgtttatttagacaaaactattttattagattttcaaatttaccagatactacttctactaagtcattgggatttaattttatttgatgtcctatctttcctgcacttactatcatgaaatctaagcctttagcactctcatgtataaatgttctgtaat

SEQ ID NO: 31653 - DNA, 260 bp, Unknown
  Description of Unknown: RightRegion for integrase B5654 sequence
aaaaaaataaatcatatagacgtcgattattacttgatagaaaccccggaagccttataaaacaaggccatccggggctttttaaataatgtatacgctcttgccatttggtcatccagttggggcactggacctggcgtccgtcacagtactgggtcaggataggctgtctcaccccgggacgggacaggtagttgtcaaatatctcatccactatcaggttgatgctctcaaatatatttctcccgtatatccacttg

SEQ ID NO: 31654 - DNA, 260 bp, Unknown
  Description of Unknown: RightRegion for integrase B5655 sequence
gtctatgacagtgagaagaaagaattaagcatttatctctactgctccgacaccctctaaacccgcataaaataaggctttagacgtactacatacgcaaatgggaaaaggttgactcagtggggttcaaaatacttagccgaccagggatattccaccattgagattctgcgctactattacggcagcagtatgtatatcaacacggcggatgaaatcagtggtgtgcctgcttcctggccgggcagcaaccttgaggt

SEQ ID NO: 31655 - DNA, 149 bp, Unknown
  Description of Unknown: RightRegion for integrase B5656 sequence
aaaaaaacaaagcccgccgatttcacgcttgaaatcaaattaaagcaggcttttctttaagttgtttaatttcctctaccttgcatagtgttattcataatattgtgcaaggtagaatttttttatttttttcaaaaaagcgttgacaa

SEQ ID NO: 31656 - DNA, 260 bp, Unknown
  Description of Unknown: RightRegion for integrase B5657 sequence
tattataaagaaaaaaagagatttgcacagtttactttggaggttaaatttaaaatataattggtatccccatacggattattgtttgtctgtatgtggatacatgtaaaattacccctaagaaatatattattactataattatacaataaaaggctaaggaaaataacttccctagctttttaatttataacgcataatcataattaaatatttattataaaatcatttattgtcgataatttattgaaaaatattcc

SEQ ID NO: 31657 - DNA, 260 bp, Unknown
  Description of Unknown: RightRegion for integrase B5658 sequence
atatttaaaaagattgtttatgatcctgaaacaactgatttagatgttaccttcatgtaacatctttttgtctaaataaactgtggagaacatccaccacgaatatatccagtatatttcattatatccttaactgctatcatttcaaccttcttttctccagctatcttagcagcattttttaaatctaattcttctgcaactggtataacaaaaacataaagctctttgcttgttccttgagctactaatgttttaaa

SEQ ID NO: 31658 - DNA, 260 bp, Unknown
  Description of Unknown: RightRegion for integrase B5659 sequence
aaaaaaacaaatcatatagacgtcgattattacttgatagaaaccccggaagccttataaaataaggccatccggggctttttaaataatgcatacgctcttgccatttggtcatccagttaggacactggacctggcgtccgtcacagtactgggtcaaaataggctgtctcacacccggacgggacaggtagttgtcaaatatctcatccacagtcagactgatgctctcaaatatatttcttccatatatccacttg

SEQ ID NO: 31659 - DNA, 109 bp, Unknown
  Description of Unknown: RightRegion for integrase B5660 sequence
ttatttaaagaaattatatatgatcctgaaactgattctttagatgttactttcatgtaacatctatttttgtctaaataaacattgtagaacatccaccacgaatata

SEQ ID NO: 31660 - DNA, 260 bp, Unknown
  Description of Unknown: RightRegion for integrase B5661 sequence
tattataaagaaaaaaagagatttgcacagtttactttagaggttaaatttaaaatataaactttttacatgtatcaacatacggattattgtttgtctgtcccatgatacatgtagaattgccccataaaaacatctttattacattatacaataaaaggctaaggaaaataacttccctagccttattttattagcaacaatggtattatagctgttgcaaataatactcctaatacaaagtatcctagtcttaataa

SEQ ID NO: 31661 - DNA, 260 bp, Unknown
  Description of Unknown: RightRegion for integrase B5662 sequence
ggcgaaaataccgaaacggaggggtgttcatccttgatgacacccgctccaccattatagtcacgactgcatatgcagtcgtgacttttttagtatatgattattcaaatatttatgcgttttttatagcaaaacaagaatcatttatgaagtataaaacaacacaatataaattatgcaaccgtacacaaaattttatgggatgcctttattttgcgttatttctttttcatacagtttttaaaacattttttatcaaa

SEQ ID NO: 31662 - DNA, 260 bp, Unknown
  Description of Unknown: RightRegion for integrase B5663 sequence
gtctatgacagtgaaaagaaagaattaagcatttatctctactgctccgacaccctctaaacccgcataaaataaggctttagacgtactacatacgcaaatgggaaaaggttgcccttttgggttttgcgtatgtagtaaaaatttaatgcttttcatactcaaaaaatgccgtatttactgctgattcaaccaatgctgaaatgccttaatgcaacttgatggtttacttaaaactccgtctgcgactgttcccatct

SEQ ID NO: 31663 - DNA, 260 bp, Unknown
  Description of Unknown: RightRegion for integrase B5664 sequence
actcgaaccccgaagatcatcgtgctgcgggactatgtcgtccttagaattgccgtataaagcaaaagagccccggcgggtgccggggctctcttagtctatcatgtatttgctggctgttgtgacagcgcagcaggctcccaggaatatgagagccgccacgctgatcaggacgatcatgccacgcccaggatcttcttggtcctgttcagaacgtcagcaggatccaggccggagcccttcaccttgccggcgatctc

SEQ ID NO: 31664 - DNA, 74 bp, Unknown
  Description of Unknown: RightRegion for integrase B5665 sequence
gaaagttcgcttttaaatgatttggtgacccagaagggattcgaacccctggccttttgattcgtagtcaaacg

SEQ ID NO: 31665 - DNA, 260 bp, Unknown
  Description of Unknown: RightRegion for integrase B5666 sequence
actcgaaccccgaagatcatcgtgctgcgggactatgtcgtcctcagaattgccgtataaagcaaaagagccccggcgggtgccggggctctcttagtctatcatgtatttgctggctgttgtgaccgcgcagcaggctcccaggaatacgagagccgccacgctgatcagggcgatcatgccacgcccaggatcttcttggtcctgttcagaacgtcagcaggatccagtccggagcccttcaccttgccggcgatctc

SEQ ID NO: 31666 - DNA, 260 bp, Unknown
  Description of Unknown: RightRegion for integrase B5667 sequence
ggcctgattatttcaatcagcgcaactagcgaccacgttcaagtagagtggaaaatctaagctctaacttctggattatcccactctacttactttcaaatctatcttttctttttaatcttgtttgtaccccttgtacaccgttgcttccgaactttccgaactatttttatttaatttgcatttttttaagatatcggtcacggatcaccagcctcggatagtctggatttcccgcatatccaattttcatcgcaatc

SEQ ID NO: 31667 - DNA, 260 bp, Unknown
  Description of Unknown: RightRegion for integrase B5668 sequence
actcgaacaccgaagatcatcgtgctgcgggactatgtcgtcctcagaattgccgtataaagcaaaagagccccggcgggtgccggggctctcttagtctatcatgtatttgctggctgttgtgacagcgcagcaggctcccaggaatacgagagcagccacgctgatcagggcgatcatgccacgcccaggatcttcttggtcctgttcagaacgtcggcaggatccaagccggagtccttcaccttcccggcgatctc

SEQ ID NO: 31668 - DNA, 109 bp, Unknown
  Description of Unknown: RightRegion for integrase B5669 sequence
gacaaagtattaataagagataacgaaattgatatacagtggaaagtgtttaatcaataatattttctataattctccctttacttctatagctataggtgattctgta

SEQ ID NO: 31669 - DNA, 260 bp, Unknown
  Description of Unknown: RightRegion for integrase B5670 sequence
gtggacaatgctccgccaacaaaaggcatcagctcaggctggtgccttttttgcggctagatggtgcggatgagaacagggcggcgattttcgatgtgcagcacaaatccatcagcctcccaaaagtgcccatccaacagaacctcgccctgaaatgtaatccggcggagcttctgtgcggcgtcggtcacctcaacggtgcaaaagcgctgcaagtagctgcaaatagcggcggcgtgggagacgacaagggcgttctg

SEQ ID NO: 31670 - DNA, 260 bp, Unknown
  Description of Unknown: RightRegion for integrase B5671 sequence
gtctatgacagtgaaaagaaagaattaagcatttatctctactgctccgacgccctctaaacccgcataaaataagactttagacgtactacatatgcaaatgggaaaaggttgactcagtgggggtcgaaatacttagccgaccagggatattccaccattgagattctgcgctactattacggcagcagtatgtatatcaacacggcggatgaaatcagtggtgtgcctgcttcctggccgggcagcaaccttgaggt

SEQ ID NO: 31671 - DNA, 260 bp, Unknown
  Description of Unknown: RightRegion for integrase B5672 sequence
actaaaactgaaaaggggaaagattatgaaattaaactttttcctaaacttcgtaaataagtctaggtggcttatttacttggtttaatccaactacatataacatactaggtatatttcattaccttccttatctactcctataggatcttgaaggaatacttctccctttgtcttcttagtattcctaaaaaacataagtatttcattgtctatacacttagctgcatatgttgcaagtcgtattcccttgttagtgt

SEQ ID NO: 31672 - DNA, 260 bp, Unknown
  Description of Unknown: RightRegion for integrase B5673 sequence
ctctctgaaaatgggctttccgttagctttaatattaaaaacggcggtcacaaaccttgatttttcaaggattctgaccgcctttctttttgttgtgggtgtatcagcgttggaaataaaaatactcccacaatggattactctatttgctcaccaccataaatcagtgtaactctattatatgttcctataaactcctctacaaaactattatattcatctatttttttgatttcccaatagttgtacaattttttgtt

SEQ ID NO: 31673 - DNA, 75 bp, Unknown
  Description of Unknown: RightRegion for integrase B5674 sequence
gaaagttcgcttttaaatgatttggtgacccagaagggattcgaacccctggccttttgattcgtagtcaaacgc

SEQ ID NO: 31674 - DNA, 260 bp, Unknown
  Description of Unknown: RightRegion for integrase B5675 sequence
gtctatgacagtgagaagaaagaattaagcatttatctctactgctccgacaccctctaaacccgcataaaataaggctttagacgtactacatacgcaaatgggaaaaggttgactcagtggggttcgaaatacttagccgaccagggatattccaccattgagattctgcgctactattacggcagcagtatgtatatcaacacggcggatgaaatcagtggtgtgcctgcttcctggccgggcagcaaccttgaggt

SEQ ID NO: 31675 - DNA, 260 bp, Unknown
  Description of Unknown: RightRegion for integrase B5676 sequence
ccgtatcaatctttagcggtacctttttgggttcgagcaaaattacattatttttcctaactccccaaaagcaagctgtattattcctaatccacaaattttctaccgaacaaaaataattaaaaaatatgttgacatttatgtagcattcgcatatactaaatgtatgagatagacctcgacgcgcctcttaacaatgcgtaccatgtcggggtcgcttttttaggagttgagatgatttgcccgaaaaaatgttaaaa

SEQ ID NO: 31676 - DNA, 260 bp, Unknown
  Description of Unknown: RightRegion for integrase B5677 sequence
actcgaaccccgaagatcatcgtgctgcgggactatgtcgtcctcagaattgccgtataaagcaaaagagccccggcgggtgccggggctctcttagtctatcatgtatttgctggctgttgtgaccgcgcagcaggctcccaggaatacgagagccgccacgctgatcggggcgatcatgccacgcccaggatcttcttggtcctgttcagaacgtcagcaggatccagtccggagcccttcaccttgccggcgatctc

SEQ ID NO: 31677 - DNA, 260 bp, Unknown
  Description of Unknown: RightRegion for integrase B5678 sequence
ttatttaaagaaattatatatgatcctgaaactgattcgttagatgttactttcatgtaacatctattttatttttgtctaaataaacattggagaacatccaccacgaatatatccagtatatttcattatatccttaactgctatcatttcaacctttttttctccagctatcttagcagcattttttaaatctaattcttctgcaactggtataacaaaaacatataactctttgcttgttccttgagctactaatg

SEQ ID NO: 31678 - DNA, 260 bp, Unknown
  Description of Unknown: RightRegion for integrase B5679 sequence
cttgaggaggccctgggcgaagggttcgacaagcgctcttccggctccaccaaaaaataagagacacgcgaaagcgtgtctcttattttttgggttcactcatttcattcgttcaccccaagggtaattaaaatgctcgatggaaatgaatcccacctccgccaagattttgctgcgcaaaatgcttgcacggcgcaaatgcgccggttttggtatccgtaggacatttaacagcgcacaaacaaatgaattgcttgtgc

SEQ ID NO: 31679 - DNA, 67 bp, Unknown
  Description of Unknown: RightRegion for integrase B5680 sequence
aatttaaaaatggtgggcatgaagagactcgaactcccacgctttcgcactagttcctaagactagc

SEQ ID NO: 31680 - DNA, 260 bp, Unknown
  Description of Unknown: RightRegion for integrase B5681 sequence
actaaaactaagaaaggaaaagattacgaaattaaactttttcctaaacttcgtaaataagcctaataggcttatttacttgcttcaatccaattacatacaacatattagatatatttcatttccttccttatccactcctataggatcttgaaggaatacctctccctttgtcttcttggtgttcctaaagaacataagtatttcattatctatacacttagctgcatatgttgcaagtcgtattcccttattagtat

SEQ ID NO: 31681 - DNA, 109 bp, Unknown
  Description of Unknown: RightRegion for integrase B5682 sequence
gtctatgacagtgaaaagaaagaattaagcatttatctctactgctccgacaccctctaaacccgcataaaataaggctttagacgtactacatacgcaaatgggaaaa

SEQ ID NO: 31682 - DNA, 260 bp, Unknown
  Description of Unknown: RightRegion for integrase B5683 sequence
actcgaactccggagatcttcgtgctgcgggactatatcgttctaaaaattgcagtataaagcaaaagagccccggcacctgccggggctctcgcttattccatatacacgccggccgcagtgatcgcgcagccggcagcgccgacgctgatgatcaggagcgcagcggctccgatcagcgccatcatgccacgcccaggatcttctcgaccctgttcaggatgtcctcgggatccaggccggagcccttcaccttgccg

SEQ ID NO: 31683 - DNA, 260 bp, Unknown
  Description of Unknown: RightRegion for integrase B5684 sequence
actcgaaccccgaagatcatcgtgctgcgggactatgtcgtcctcagaattgccgtataaagcaaaagagccccggcgggtgccggggctctcttagtctatcatgtatttgctggccgttgtgacagcgcagcaggctcccaggaatacgagagccgccacgctgatcaggacgatcatgccacgcccaggatcttcttggtcctgttcagaacgtcagcaggatccaggccggagcccttcaccttgccggcgatctc

SEQ ID NO: 31684 - DNA, 260 bp, Unknown
  Description of Unknown: RightRegion for integrase B5685 sequence
gtctatgacagtgagaagaaagaattaagcatttatctctactgctccgacaccctctaaacccgcataaaataaggctttagacgtactacatacgcaaatgggaaaaggatgactcagtgggggtcgaaatacttagccgaccagggatattccaccattgagattctgcgctactattacggcagcagtatgtatatcaacacggcggatgaaatcagtggtgtgcctgcttcctggccgggcagcaaccttgaggt

SEQ ID NO: 31685 - DNA, 260 bp, Unknown
  Description of Unknown: RightRegion for integrase B5686 sequence
atatttaaaaagattgtttatgaccctgaaacaaatgatttagatgttacctttatgtgacatctttttgtctaaataaactgtggtgaacatccaccacgaatatatccagtatatttcattatatccttaactgctatcatttcaaccttcttttctccagctatcttagcagcattttttaaatctaattcttctgcaactggtataacaaaaacatataactctttgcttgttccttgagctactaatgttttaaa

SEQ ID NO: 31686 - DNA, 260 bp, Unknown
  Description of Unknown: RightRegion for integrase B5687 sequence
ttatttaaagaaattatatatgatcctgaaactgattcgttagatgttactttcatgtaacatctatttttgtctaaataaacattggagaacatccaccacgaatatatccagtatatttcattatatccttaactgctatcatttcaaccttcttttctccagctatcttagcagcattttttaaatctaattcttctgctactggtataacaaaaacatataactctttgcttgttccttgagctactaatgtttta

SEQ ID NO: 31687 - DNA, 260 bp, Unknown
  Description of Unknown: RightRegion for integrase B5688 sequence
tattataaagaaaaaaagagatttgcacagtttactttggaggttaaatttaaaatataacaggtatcaacatacggattattgtttgtctgtcctatgatacatgtagaattaccccataaaaacatctttattacattatataacaaaaggctaaggaaaataacttccctagccttattttattaataatagtggtactatagctgttgctactaatactcctaatacaaagtatcctagtcttaataatatatcta

SEQ ID NO: 31688 - DNA, 260 bp, Unknown
  Description of Unknown: RightRegion for integrase B5689 sequence
actcgaaccccgaagatcatcgtgctgcgggactatgtcgtcctcagaattgccgtataaagcaaaagagccccggcgggtgccggggctctcttagtctatcatgtatttgctggctgttgtgacagcgcagcaggctcccaggaatacgagagccgccacgctgatcagggcgatcatgccacgcccaggatcttcttggtcctgttcagaacgtcagcaggatccaggccggagcccttcaccttgccggcgatctc

SEQ ID NO: 31689 - DNA, 260 bp, Unknown
  Description of Unknown: RightRegion for integrase B5690 sequence
aaaggcggcacgttgtcggatttcgcttccaatgcaccagcattcaccaggcggatttgatgtaattgcccactgccgtaactgtctttctgattatgaatggttctgtgataaggatggcggtgtctctgatatgaagcagtatttcttcgggtaaggcgagcataaatctcagttagcgttttggggcgtatctctttatctctggcaactcacctgaactactactaattcggaaaattttacacacatttagccat

SEQ ID NO: 31690 - DNA, 260 bp, Unknown
  Description of Unknown: RightRegion for integrase B5691 sequence
tataacaaagaaaaaaagagatttgcacaatttactttggaggtcaaatttaaaatataggactatttacaggtatcaccacacagattattgtttgtctgtatcatgatacctgtaaaaccatcccataaaaacatctttattgtataatatgaataatatagcacttgctactccaattcctaagtatgctatgcgtcctgctacttctaatgctagttttttcatgccgacacctcctttattagagtatcaactat

SEQ ID NO: 31691 - DNA, 260 bp, Unknown
  Description of Unknown: RightRegion for integrase B5692 sequence
aaaggcggcacgttgtcggatttcgcttccaatgcaccacctatgaatcctcttgtatgactttttgtttgtatcaccctccggaatctcaagcatttttctgagtccagctttcggtttgaagtaccgattagcatctggatgattttccacatcgttcttttcaaaccagtactgtactgtaagttctttttctattccatcagggcattcgctaacagaaccttccacaaatggggtcatatccggccattgttcat

SEQ ID NO: 31692 - DNA, 109 bp, Unknown
  Description of Unknown: RightRegion for integrase B5693 sequence
gtctatgacagtgagaagaaagaattaagcatttatctctactgctccgacaccctctaaacccgcataaaataaggctttagacgtactacatacgcaaatgggaaaa

SEQ ID NO: 31693 - DNA, 260 bp, Unknown
  Description of Unknown: RightRegion for integrase B5694 sequence
tcgttcgcctgctgcaaggaatggggagccaaaacaaaaacatacaaaccgtttcgataatatgcggctgtatggtaatcaaaaagcgtcgggaataacttctcggcgcttttacttttccctaaacaagaaatctcccgccctcaaacgagagcgggagaaaattttatttatcctcttttgaacctatctgcatatcagcagcctcttccgtctttgattttatgtttttcgccaacttgagcaaaaatggcggcaga

SEQ ID NO: 31694 - DNA, 260 bp, Unknown
  Description of Unknown: RightRegion for integrase B5695 sequence
ggtttgatctctacgatcaaggccaccagcgaccgtgttcagatagagtggaaaatctgacatttccgctctatcgcccctcatttctattttatcttgtttgtaccccttgtacaccgatgtttgttttgcatgtgaaaaatatgagataagagttatttttagggtaccattctgtgtgctacattcccagagaaaccagaggaatgaagataaacaatgtcagaatgggaatcaaaatctgtgtgacagcaatatca

SEQ ID NO: 31695 - DNA, 96 bp, Unknown
  Description of Unknown: RightRegion for integrase B5696 sequence
gaaagttcgcttttaaatgatttggtgacccagaagggattcgaacccctggccttttgattcgtagtcaaacgctctatccagctgagctactga

SEQ ID NO: 31696 - DNA, 72 bp, Unknown
  Description of Unknown: RightRegion for integrase B5697 sequence
gaaagttcgcttttaaatgatttggtgacccagaagggattcgaacccctggccttttgattcgtagtcaaa

SEQ ID NO: 31697 - DNA, 260 bp, Unknown
  Description of Unknown: RightRegion for integrase B5698 sequence
actcgaaccccgaagatcatcgtgctgcgggactatgtcgtccttagaattgccgtataaagtaaaagaaccccggcgggtgccggggttcttttgctttatcatgtatttgctggcagcgccatcatgccacgcccaggatcttctcgaccctgttcagaacgtcagcaggatccaggccggagcccttcaccttgccggcgatctcctgcgccagcacgtcagcaggatccggctcggccggcttcgctgcgacgccc

SEQ ID NO: 31698 - DNA, 260 bp, Unknown
  Description of Unknown: RightRegion for integrase B5699 sequence
ctctctgaggatgggctttccgttagctttaatattaaaaacggcggtcacaaaccttgatttttcaagggttctgaccgcctttctttttgttgtgggtgtatccacatcccactgaatggtataatacccattctgctccgctgtttcaatcacatggttatcatattccccaaagggcgggcgaaacagttccatctccactcccgtaagcttcttcacgttttcatgacacttctgcaattcctgcgcgatttcct

SEQ ID NO: 31699 - DNA, 260 bp, Unknown
  Description of Unknown: RightRegion for integrase B5700 sequence
aacatactagagattttggagagagattatttaaatcttgataaaataagtcttgattagccatagtttattaaattatcggtggagactcttcataaaggctttaaaaataacatctgagataacttgattagctgtctcagtatcttttaaaagagtctcttcttctttttctaagtagttgagatattctgttaggcgttcctgtctttgttcttcacttagtagtgactcttctaaacctaacaactctaagaact

SEQ ID NO: 31700 - DNA, 260 bp, Unknown
  Description of Unknown: RightRegion for integrase B5701 sequence
ggcttgatctctacaatcaaggccaccagcgaccatgttcagatagagtggaaaatctgacatttccgctctatcgcccctcatttctattttatcttgtttgtaccccttgtacaccgatgtttgacactgctcatataaatgcagaaagagaacatggcgtttccaggaatgaagcggaaaggtttataaaagaagctgatatatctcttacacgctggaacggaagatttgtaaattattacggacctaatggagcc

SEQ ID NO: 31701 - DNA, 260 bp, Unknown
  Description of Unknown: RightRegion for integrase B5702 sequence
aaaaaaataaatcatatagacgtcgattattacttgatagaaaccccggaagccttataaaacaaggccatccggggctttttaaataatgtatacgctcttgccatttggtcaaccagattgcatgtgcgtatgagtaatttctatattataacattcaattttttcctctgcatttagatgtgtctcccctccagttcaatcccaatctccttcaacgatataataacattttttcaaaactttatcaatttctcttg

SEQ ID NO: 31702 - DNA, 260 bp, Unknown
  Description of Unknown: RightRegion for integrase B5703 sequence
acgaacggcgaagtattcatcaacttcagggaaacgggaattaagacatttaaggagtaaagatgacgatatgcagaaaaatcaatatatcggtcggagcgaaggggcggaatcgaatcctgactggagaagccgaaggactgcttgaattcaagtcaaagcccgacagggcggcggaaacgctttcgtttgcgattctatttgaatcgtggatcgaaagcggagttgcatcggattattccgacatcgccaaaattacg

SEQ ID NO: 31703 - DNA, 260 bp, Unknown
  Description of Unknown: RightRegion for integrase B5704 sequence
gtctatgacagtgaaaagaaagaattaagcatttatctctactgctccgacaccctctaaacccgcataaaataaggctttagacgtactacatacgcaaatgggaaaaggttgcccttttgggttttgcgtatgtagtaaaaatttaatgcttttcatgctcaaaaaatgccgtatttactgctgattcaaccaatgctgaaatgccttaatgcaacttgatggtttacttaaaactccgtctgcgactgttcccatct

SEQ ID NO: 31704 - DNA, 176 bp, Unknown
  Description of Unknown: RightRegion for integrase B5705 sequence
gataaagaagctaagaatgatgactttgaattaactatctacccaaaatttctaagatagataattacatacatcatcaacaacaaatttcattaccttctttgtccactcctattggatcctgagatcggaagagcgtcgtgtagggaaagagtgtagatctcggtggtcgccgt

SEQ ID NO: 31705 - DNA, 260 bp, Unknown
  Description of Unknown: RightRegion for integrase B5706 sequence
aaaggcggcacgttgtcggatttcgcttccaatgcaccagcagagagtcgccgaacatgaagttgacgccctcatcgtaggtggcggggtcattctggaacacgctgaacatcggctgccagatgggcaggccgttctcatgtgcgcgctccatcagggagtagagcgtcgggctgagcttgtagcggaagtcgatggccgccttgatgtactgcttcttgtcgctgtacatccagggctcggtcacggtgttgtcggtg

SEQ ID NO: 31706 - DNA, 109 bp, Unknown
  Description of Unknown: RightRegion for integrase B5707 sequence
gtctatgacagtgaaaagaaagaattaagcatttatctctactgctccgacaccctctaaacccgcataaaataaggctttagacgtactacatacgcaaattggaaaa

SEQ ID NO: 31707 - DNA, 260 bp, Unknown
  Description of Unknown: RightRegion for integrase B5708 sequence
actaaaactaataaaggaaaagattacgaaattaaactttttcctaaacttcgtaaataagtctaataggcttatttacttggtttaatccaattacatacaacatgttagatatatttcattcccttccttatccactcctataggatcttgaagaaacacttctccctttgtcttcttgctgttcctaaagaacataagtatttcattatctatacacttagccgcatatgttgcaagtcgtattcccttgctagtat

SEQ ID NO: 31708 - DNA, 260 bp, Unknown
  Description of Unknown: RightRegion for integrase B5709 sequence
gaagatggcttaaaataccgttttcgtggacaatttgtgcagattagcctcttacaatagaaacattatgccggaaactgggatgtacttagaccggcagcagaaatagaagaaatgaatacatttacggcagataatttaaatgcgttgcttcacgaagcggaagaaataatggaaggatggactgatacagatggaggagaacaaaacgagtgttccgatgaatgaacaggcagtagaaaatgatagagacgcgcgag

SEQ ID NO: 31709 - DNA, 260 bp, Unknown
  Description of Unknown: RightRegion for integrase B5710 sequence
gtctatgacagtgagaagaaagaattaagcatttatctctactgctccgacaccctctgaacccgcataaaataaggctttagacgtactacatacgcaaacggaaaaaggttgcccttttcggttttgcgtatgggggaaattctttattttttgtgacgaaataggggagaaattttgatatgccatatgatattttatatattatcacaatgtagaggaggtgacaatcttcatgcagaaatatgagcattttatag

SEQ ID NO: 31710 - DNA, 260 bp, Unknown
  Description of Unknown: RightRegion for integrase B5711 sequence
tcgttcgcctgctgcaaggaatggggaagtgaaaatgaaaaaaagcaaaaaaaaagttaaagcgatgtgtgcattaattatattaattatattttatctcataatagtaaattcaccactcaattatacatttgaagaaaacagcagtggatataccgttacaggacaaagaatatggtttcctttcatattggtacccaatgggtataactcagaaaaggttacaatagttggggctggtgcatttgagtggaatgaga

SEQ ID NO: 31711 - DNA, 260 bp, Unknown
  Description of Unknown: RightRegion for integrase B5712 sequence
ggcctgattatttcaatcagcgcaaccagcgaccacgttcaagtagagtggaaaatctgaacactcttgattttgccactctacttactttcaaatctaacatttctttttaatcttgtttgtaccccttgtacaccgatgcttaaaaaatggattgatactccggaactggagaaaaaccagaaattcattgcggattggcactattttctgaaggatacgcagtatatgcttcagaagccggagaatgaggcgaggag

SEQ ID NO: 31712 - DNA, 260 bp, Unknown
  Description of Unknown: RightRegion for integrase B5713 sequence
gaaaaaaatcaaaaaaatgataattttagtatagaactttaccctaagttgcctaaataaatatgcccttttactgttactattaaacatctaactggttatggggttaatagtaacagtaattggattattgttcaaaaatttcaacgtatttttcagaagaagttatataaactcctgattttaatttgtacatatctgttcctgttctttcaattttttgagctatagtaaatacatcaccttttttcacttttcct

SEQ ID NO: 31713 - DNA, 109 bp, Unknown
  Description of Unknown: RightRegion for integrase B5714 sequence
gtctatgacagtgaaaagaaagaattaagcatttatctctactgctccgacaccctctaaacccgcataaactaaggctttagacgtactacatacgcaaatgggaaaa

SEQ ID NO: 31714 - DNA, 260 bp, Unknown
  Description of Unknown: RightRegion for integrase B5715 sequence
gaatcagagagcagtggttcggatttgaacgcaaatgctccaccattcaaaaacctttgagccataacggcttgagggtttttctttttagcgcggcttaggccgtttgggagcccgtacagctttttgtgcctgatagaataggaaaaagatcgtgataaaggagtaagcctggatgcgcagggaagttcaaaacgccccggatgcaatcaaaattcggggcgggcgggtacacaacctgaaaaatatcgatgtggacg

SEQ ID NO: 31715 - DNA, 260 bp, Unknown
  Description of Unknown: RightRegion for integrase B5716 sequence
ctctctgaggatgggctttccgtcagctttaacataaaaaaaggtggtcacaaaccttgatttttcaaggattctgaccgcctttctttttgttgttggtgtatcagcgttggaaacaagaataattcttctggcataaacattatgtattcatctttccttctgtaaaatacggataatatctatatatcttgcgaaatttatttatttcatctaaagtaataccatgaaatttttctttattatattcttcatctgta

SEQ ID NO: 31716 - DNA, 260 bp, Unknown
  Description of Unknown: RightRegion for integrase B5717 sequence
ttatttaaagaaattatatatgatcctgaaactgatttgttagatgttactttcatgtaacatctattttatttttgtctaaataaacattggagaacatccaccacgaatatatccagtatatttcattatatccttaactgctatcatttcaactttcttttcgcctgctatcttagcagcattctttaaatctaattcttctgctactggtataacaaaaacatataactctttacttgttccttgagccactagtg

SEQ ID NO: 31717 - DNA, 260 bp, Unknown
  Description of Unknown: RightRegion for integrase B5718 sequence
ggtttgatctctacgatcaaggccaccagcgaccgtgttcagatagagtggaaaatctgacatttccgctctatcgcccctcatttctattttatcttgtttgtaccccttgtacaccgatgttttcatatcgtttgcagaaaataatagaaataacgaatatagattttaataatccagcagaagtgcttagtgttcgaattggattgatagcaattcgagttcttgaagtaatgtagaatttttaagaatcttttgga

SEQ ID NO: 31718 - DNA, 260 bp, Unknown
  Description of Unknown: RightRegion for integrase B5719 sequence
gtctatgacagtgaaaagaaagaattaagcatttatctctactgctccgacaccctctaaaccagcataaaataagactttagacgtactacatacgcaaatgggaaaaggttgactcagtggggttcgaaatacttagccgaccaggggtattccaccattgaaattctgcgctattattacggcagcagtatgtatatcaacacggcggatgaaatcagtggtgtgcctgcttcctggccgggcagcaaccttgaggt

SEQ ID NO: 31719 - DNA, 260 bp, Unknown
  Description of Unknown: RightRegion for integrase B5720 sequence
ctctctgaggatgggctttccgttagctttaatataaaaaaaggtggtcacaaaccttgatttttcaaggattctgaccgcctttctttttgttgtgggtgtatccacatcccactgaatggtataatacccattctgctccgctgtttcaatcacatggttatcatactccccaaagggcgggcgaaacagttccatctccactcccgtaagcttcttcacattttcatgacacttctgcaattcctgtgcaatttcct

SEQ ID NO: 31720 - DNA, 260 bp, Unknown
  Description of Unknown: RightRegion for integrase B5721 sequence
gtctatgacagtgagaagaaagaattaaacatttatctctactgctcagacaccctctaaacccgcataaactaaggctttagacgtactacatacgcaaatgggaaaaggatgactcagtggggttcgaaatacttagccgaccagggatattccaccattgagattctgcgctattattacggcagcagtatgtatatcaacacggcggatgaaatcagtggtgtacctgcttcctggccgggcagcaaccttgagat

SEQ ID NO: 31721 - DNA, 260 bp, Unknown
  Description of Unknown: RightRegion for integrase B5722 sequence
atatttaaaaagattgtttatgaccctgaaacaaatgatttagatgttacctttatgtgacatctttttgtctaaataaactgcggtgaacatccaccacgaatatatccagtatatttcattatatccttaactgctatcatttcaactttcttttctccagctatcttagcagcattttttaaatctaattcttctgcaactggtataacaaaaacatataactctttgcttgttccttgagctactaaggttttaaa

SEQ ID NO: 31722 - DNA, 260 bp, Unknown
  Description of Unknown: RightRegion for integrase B5723 sequence
agcttggtggaaagtatttacgcttcacaagataaaatcaaaataaactggaaaatttaactcgcaaatccattcgcctttgtttgtaatggttcgccgaagcgctggaagtgcacgatctcgcgcgcccgcaggaacttgatgacgtcgttgacgtcgggatcgtcggaaaggcgcaggatgttatcgtaggtcacgcgcgccttctgctcggcggcgaggtcctcggtgaggtcggcgatggtatcgcccgtgacctg

SEQ ID NO: 31723 - DNA, 260 bp, Unknown
  Description of Unknown: RightRegion for integrase B5724 sequence
acgaacggcgaagtattcattaacttcagggaaacgggaattaagacatttaaggagtaaagatgacgatatgcagaaaaatcaatatatcggtcggcgcgaaggggcggaatcgaatcctgactggagaagccgaaggactgcttgaattcaagtcaaagcccgacagggcggcggaaacgctttcttttgccattctattcgagtcgtggctcgaaagcggcgttgcatcggattattccgacatcgccaaaattacg

SEQ ID NO: 31724 - DNA, 260 bp, Unknown
  Description of Unknown: RightRegion for integrase B5725 sequence
cccaagtcggataggtatcaccaaaacctcgcagagatcgatattgagcttgtattttaaagcgatgaagttatgtatatcattgaggagctaattcttctgttcctacatctgtcaatatagcctgaacttctctgcacggcgctgcataacgctgattaagataccttaatgaagctcccaattcgccgtccgggccgccaagctgactgataattacctttgcaagcgcaggattagggttcttgatgttaaccgga

SEQ ID NO: 31725 - DNA, 96 bp, Unknown; identical to SEQ ID NO: 31695
  Description of Unknown: RightRegion for integrase B5726 sequence

SEQ ID NO: 31726 - DNA, 260 bp, Unknown
  Description of Unknown: RightRegion for integrase B5727 sequence
atatttaaaaagattgtttatgaccctgaaacaaatgatttagatgttacctttatgtgacatctttttgtctaaataaactgtggtgaacatccaccacgaatatatccagtatatttcattatatccttaactgctatcatttcaactttcttttcgcctgctatcttagcagcattctttaaatctaattcttctgctactggtataacaaaaacatataactctttgcttgttccttgagccactaatgttttaaa

SEQ ID NO: 31727 - DNA, 109 bp, Unknown; identical to SEQ ID NO: 31681
  Description of Unknown: RightRegion for integrase B5728 sequence

SEQ ID NO: 31728 - DNA, 260 bp, Unknown
  Description of Unknown: RightRegion for integrase B5729 sequence
tattataaagaaaaaaagagatttgcacagtttactttggaggttaaatttaaaatatagacttacaggtatcaacatacggattattgtttgtctgtcccatgatacatgtagaattaccccataaaaacatctttattacattatacaataaaaggctaaggaaaataacttccctagccttattttacactataaataacatagcacataatacaccaataccaaagtatgctatacgccctgccacttctaagata

SEQ ID NO: 31729 - DNA, 260 bp, Unknown
  Description of Unknown: RightRegion for integrase B5730 sequence
agagagaaacggtatagcttcggctatgccgtttttctcattcttgccttgatgaagtaactttcgatacttccagggctccaatgcccttatagtagatgtcaatttcctgggtgcggttcttgccctttggatcgctggcggcatggacaacgatcttctcgacaaactcatgtaagatacatggggttaattcaggaatttccgtataccgttctacaacggagagaaacctttccacattggcgcttttttgttcc

SEQ ID NO: 31730 - DNA, 260 bp, Unknown
  Description of Unknown: RightRegion for integrase B5731 sequence
actcgaaccccgaaggtcatcgtgctgcgggactatgtcgtcctcagaattgccgtataaagcgagagagccccggcgggtgccggggctctcttagtctatcatgtatttgctggctgttgtgaccgcgcagcaggctcccaggaatacgagagccgccacgctgatcagggcgatcatgccacgcccaggatcttcttggtcctgttcagaacgtcagcaggatccaggccggagcccttcaccttgccggcgatctc

SEQ ID NO: 31731 - DNA, 260 bp, Unknown
  Description of Unknown: RightRegion for integrase B5732 sequence
tcgttcgcctgctgcaaggaatggggagccaaaacaaaaacatacaaaccgtttcgataatatgcggctgtatggtaatcaaaaagcgtcgggaataacttctcggcgcttttacttttccctaagattacaaggaaaaggtatctgctgaattatccgagcaggaagcggacaggcaggagcttattgagcttagagatcttgtgtataagctgcaaaacagcagcggtgctgaacctgagatagaaaatgccgataaa

SEQ ID NO: 31732 - DNA, 260 bp, Unknown
  Description of Unknown: RightRegion for integrase B5733 sequence
actcgaaccccgaagatcatcgtgctgcgggactatgtcgtcctcagaattgccgtataaagcaaaggagccccggcgggtgccggggctctcttagtctatcatgtatttgctggctgttgtgaccgcgcagcaggctcccaggaatacgagagccgccacgctgatcagggcgatcatgccacgcccaggatcttcttggtcctgttcagaacgtcagcaggatccagtccggagcccttcaccttgccggcgatctc

SEQ ID NO: 31733 - DNA, 260 bp, Unknown
  Description of Unknown: RightRegion for integrase B5734 sequence
ggtttgatctctacgatcaaggccaccagcgaccgtgttcagatagagtggaaaatctgacatttccgctctatcgcccctcatttctattttatcttgtttgtaccccttgtacaccgatgtttgtaacagaccagtataaagatagcggatacactgaatcttcattgtttactagcaaaacaggatattattctcaagagtatcttgtctggacacaagaagggcaaaagtttatttatcaaatgttaaaagataag

SEQ ID NO: 31734 - DNA, 109 bp, Unknown
  Description of Unknown: RightRegion for integrase B5735 sequence
gtctatgacagtgaaaagaaagaattaagcatctatctctactgctccgacaccctctaaacccgcataaaataaggctttagacgtactacatacgcaaatgggaaaa

SEQ ID NO: 31735 - DNA, 260 bp, Unknown
  Description of Unknown: RightRegion for integrase B5736 sequence
gaagaaagcgattttgtttcggattccatcgcaaatgctccaccagcaaaaaacccttgagccataaaggcttgagggttttttcttgttcttcggccacttcgtgccgcctgtccttcaagcggcgctgctccccaaaaacctgcccgcgaagtctggatacccagagtccacagcctgaagcctggaacgccgggccgtgtccctggcttgcttgaccgccctctcaaccatcggggttctgcgcgcttttgcgcaca

SEQ ID NO: 31736 - DNA, 260 bp, Unknown
  Description of Unknown: RightRegion for integrase B5737 sequence
actaaacttaatagatccaaagagcatgttattaaagtttttcctaaacttcgtaaataagtctatatggcttatttacttagttccacctaattacatacaacatattaattatatttcatttccttccttatccactcctataggatcttgaagaaagacttctccctttgtctttttgctgttcctaaagaacataagtatttcattatctatacacttagccgcatatgttgcaagtcgtattcccttgctagtat

SEQ ID NO: 31737 - DNA, 109 bp, Unknown; identical to SEQ ID NO: 31681
  Description of Unknown: RightRegion for integrase B5738 sequence

SEQ ID NO: 31738 - DNA, 260 bp, Unknown
  Description of Unknown: RightRegion for integrase B5739 sequence
actcgaaccccgaagatcatcgtgctgcgggactatgtcgtcctcagaattgccgtataaagcaaaagaaccccggcgggtgccggggttcttttgctttatcatgtatttgctggcagcgccatcatgccacgcccaggatcttctcgaccctgttcagaacgtcagcaggatccaggccggagcccttcaccttgccggcgatctcctgcgccagcacgtcagcaggatccggctcggccggcttcgctgcgacgccc

SEQ ID NO: 31739 - DNA, 260 bp, Unknown
  Description of Unknown: RightRegion for integrase B5740 sequence
ctctctgaggatgggctttccgttagctttaatataaaaaacggcggtcacaaaccttgatttttcaaggattctgaccgcctttctttttgttgtgggtgtatccacatcccactgaatggtataatacccattctgctccgctgtttcaatcacatggttatcatattccccaaagggcgggcgaaacagttccatctccactcccgtaagcttcttcacgttttcatgacacttctgcaattcctgcgcgatttcct

SEQ ID NO: 31740 - DNA, 260 bp, Unknown
  Description of Unknown: RightRegion for integrase B5741 sequence
atcaaagaggttcgcatatttacagacgaaatccgcatcttttggaaatacgacttataagaccatcgaaaaatcatatttttatgagttataactgataaaatatgggcagattttacccaaagtctgccaaaccagaaccacggttgataccatcgactcagattggcagacctgacacgtcatcgcttactatgttaatgcttatttagtgtgcataaaccttagcatattgagtaaaaaatagggaacttaccagc

SEQ ID NO: 31741 - DNA, 260 bp, Unknown
  Description of Unknown: RightRegion for integrase B5742 sequence
agcctcatttctcaaatccgcgccacgggtgaatgtgtcgccattgagtggaaaatctgactttcaactattcaccgcacttgactatgggctgtatgcccttgtcaagtgatgttatcataatataataccagattataaaatgcagcaggagaatgaattagagcaagttgctccagaacaaaaagcacccgactttcacagagaagcagacaaaaataatagaacagtgatggtgttgcgctggatacagagatgtg

SEQ ID NO: 31742 - DNA, 260 bp, Unknown
  Description of Unknown: RightRegion for integrase B5743 sequence
ataaaagaggttcgcatatttacagacgaaatccgcatcttttggaaatacgacttataagaccatcgaaaaaccatatttttatgagttataactgataaaatatgggccaactttactctaagtctgccaaaccagaaccacggttgataccatcgactggaaggaagaacgcagcgcccagaccatattggataccgtcctccccaagcttcaccccggctgcgtaatactctgccataacaacggatataagataa

SEQ ID NO: 31743 - DNA, 260 bp, Unknown
  Description of Unknown: RightRegion for integrase B5744 sequence
ataaaagaggttcgcatatttacagacgaaatccgcatcttttggaaatacgacttataagaccatcgaaaaaccatatttttatgagttataactgataaaaatatgggccaattttactctaagtctgccaaaccagaaccacggtcgataccatcgactcagattggcagacctgacacgtcatcgcttactatgttaatgcttatttagtgtgcataaaccttagcatattgagtaaaaaatagggaacttaccag

SEQ ID NO: 31744 - DNA, 260 bp, Unknown
  Description of Unknown: RightRegion for integrase B5745 sequence
gccgtggacaatgctccaccaaaaaaaagagcgcagctatgctattttgttgcaaaatagcatagctgcgattctttttttgtacaattcactgctcaactgattgcgtatcgactcccggcgttttttgtattgctgcataaatgtcatgtactcggggctacatcaatataacggtcgttgctttctttggtggctgtgtgctgatagccgaagtccctaaaaaccaaaaggctcttgttgacatgaacggtacatta

SEQ ID NO: 31745 - DNA, 260 bp, Unknown
  Description of Unknown: RightRegion for integrase B5746 sequence
gattctgcgcttacacctccaccatccagccggaacgaatcgttccggcttttcttttaggctgacttcacgcttccgatttttctgaccggatgtctttctgcacagtggtaaaatataaacggttcacatcgcaattgggaggaaacctcatgaacacatccgcgctttcaaagcggcgaatcaccgctgcccatgcgttttttctcggtactctactggcattttttgccttagcacccgctatcttcccctatggc

SEQ ID NO: 31746 - DNA, 260 bp, Unknown
  Description of Unknown: RightRegion for integrase B5747 sequence
atcaaagaggttcgcatatttacagacgaaatccgcatcttttggaaatacgacttataagaccatcgaaaaaccatatttttatgagttataactgataaaatatgggcagattttacccaaagtctgccaaaccagaaccacggttgataccatcgactggaaggaggagcgcagcgcccagaccatattggataccgtcatacccaagcttcaccccggctgcgtaatactctgccataacaacggatataagataa

SEQ ID NO: 31747 - DNA, 260 bp, Unknown; identical to SEQ ID NO: 31323
  Description of Unknown: RightRegion for integrase B5748 sequence

SEQ ID NO: 31748 - DNA, 260 bp, Unknown
  Description of Unknown: RightRegion for integrase B5749 sequence
ggcctgatctcacagatccgcgcaaccgacgaacacgtttcgattgagtggaaaatttgacttttacttatccatcgcacacaacaaagggctgtgtgcccttgtcaagcgatgtaaaagtatactaagaattccaaacaaatatctctatacccctgatatgcagatggcttatcatgcccaaagtaatctcccttgataacattgggaaaataaaatcttccgatttctgtcagtgcagatagtctggaaagcatttc

SEQ ID NO: 31749 - DNA, 260 bp, Unknown
  Description of Unknown: RightRegion for integrase B5750 sequence
ataaaagaggttcgcatatttacagacgaaatccgcatcttttggaaatacgacttataagaccatcgaaaaaccatatttttatgagttataactgataaaatatgggccaactttactctaagtctgccaaaccagaaccacggttgacactatcgactggaaggaagaacgcagcgcacagaccatactggataccgtcctccccaagcttcaccccggctgcgtaatactctgccacaacaacggatataagataa

SEQ ID NO: 31750 - DNA, 260 bp, Unknown
  Description of Unknown: RightRegion for integrase B5751 sequence
atcaaagaggttcgcatatttacagacgaaatccgcatcttttggaaatacgacttataagaccatcgaaaaaccatattttgatgagttataactgataaaatatgggccaattttgctctaagtctgccaaaccagaaccacggtggataccatcgactcagattggcagacctgacacgtcatcgcttactatgttaatgcttatttagtgtgcataaaccttagcatattgagtaaaaaatagggaacttaccagc

SEQ ID NO: 31751 - DNA, 109 bp, Unknown
  Description of Unknown: RightRegion for integrase B5752 sequence
atattcaaaaaaataatatatgactataaaacagataaatttgaggtgtcttttaactaattttttgtttaatttaaaattaatgtacttccaccagtagcgtggaaga

SEQ ID NO: 31752 - DNA, 260 bp, Unknown
  Description of Unknown: RightRegion for integrase B5753 sequence
ataaaagaggttcgcatatttacagacgaaatccgcatcttttggaaatacgacttataagaccatcgaaaagccatatttttatgagttataactgataaaaatatgggccaattttactctaagtctgccaaaccagaaccacggttgataccatcgactcagattggcagacctgacacgtcatcgcttactatgttaatgcttatttagtgtgcataaaccttagcatattgagtaaaaaatagggaacttaccag

SEQ ID NO: 31753 - DNA, 260 bp, Unknown
  Description of Unknown: RightRegion for integrase B5754 sequence
cgcatagatctggatggggaaaatattgatatacattggagcttttcccctgaggcgtagttgataggtggtatatatggaaaaattgcatttcaaagtatcgtcgcctgagagctttattaaactggcctgtacgatgctttttgaaaaaaccgatgcgcataaagaatggggttccgtatggaatgaagcgtttgcgggaatccaaggtgaagaattatttttgaaattcacggaggagctttttcctgcaggctgca

SEQ ID NO: 31754 - DNA, 260 bp, Unknown
  Description of Unknown: RightRegion for integrase B5755 sequence
cgcatagatctggatggggaaaatattgatatacattggagcttttcccctgaggcgtagttgataggtggtatatatggaaaaattgcatttcaaagtatcgtcgcctgagagctttattaaactggcctgtacgatgctttttgaaaaaaccgacgcgcataaagaatggggttccgtatggaatgaagcgtttgcgggaatccaaggcgaagaattatttttgaaattcacggaggagctttttcctgcaggctgca

SEQ ID NO: 31755 - DNA, 260 bp, Unknown
  Description of Unknown: RightRegion for integrase B5756 sequence
ggcctgatttcttcaatcagcgcaaccagcgactatgtaaagatagagtggaaaatctgacaatctttccactctatcaaaccacttgtttctttataccgcttgtagccccttgtacaccgttgcttctaggcattgagaaaactctccttgctctttttgaataatcccttcaacatttttaaatctcgataggagttgccatttttctgaattagtcaatttttccgaagatgatactatgagacaatattttttta

SEQ ID NO: 31756 - DNA, 203 bp, Unknown
  Description of Unknown: RightRegion for integrase B5757 sequence
atcaaagaggttcgcatatttacagacgaaatccgcatcttttggaaatacgacttataagaccattgaaaaaccatattttgatgagttataactgataaaatatgggccaattttgctctaagtctgccaaaccagaaccacggtggataccatcgattggaaggaagaacgcagcgcccagaccatattggatacggtca

SEQ ID NO: 31757 - DNA, 260 bp, Unknown
  Description of Unknown: RightRegion for integrase B5758 sequence
tccaacgacggcgttggcttgaacgtgcacaacatcaagctcgatatttttttcaaatagacatgcatcatattacagctatctcaactgttgtaacaggatgcatgtatttggcacaaaaaagagggcgcacccgtcatggatgcgccatcttcgcttcattgcctccgcaggtagacatcgcttccgtcggaagtcccgaccgcgatgtaacgcgtggcaccgctgtatgacgtgtagcggccccacaggtagccgtc

SEQ ID NO: 31758 - DNA, 260 bp, Unknown
  Description of Unknown: RightRegion for integrase B5759 sequence
aaaggctgggcgccggcacaatttgagcttgaggttgctttaagaccttcgttcttgtaacttgcacaatgttcctctccacaactgtcatataccctgtaggcatcaatacatacggcctctttttcacatccgggttcgtaattgcagcctgcggctgaagaaaattctgtttccgccataaaagttcctccttatttcaagggctttttgaaaacctgtaccctttacctgctttcaaattggcccatagctttact

SEQ ID NO: 31759 - DNA, 260 bp, Unknown
  Description of Unknown: RightRegion for integrase B5760 sequence
agtctcatcgtgaagatcacagcgtgcaaagataggatccagatctactggaaaatttgacgcgccgacacttaccaagttgtacggttcgaatcaactaagaaattaaggtcaaaagtataaaaaatggagccatcatcgccatttttcgctataatatatccatgattagagtggggatacgaaatgtcccagatgcggaggagagctgaagaagtatgacaaagtaaagaggatcgttcggacaaaacacggaaagt

SEQ ID NO: 31760 - DNA, 260 bp, Unknown
  Description of Unknown: RightRegion for integrase B5761 sequence
tctgacagcaaaaaactactggaatacatgaacgctgagaaagagcaattggataactaactacaaccataaatgtaacaatacgtattgcatttaactaaatgttaaccacgttaatattttacgtagcatccttgacaagctaacataagacaaaatcagagcttcgtgttttaatctattgagtttcttactcattaacttcaaaaggaatcgaaatgaaattaccaattgttgatgtatttgagaacccatacgaa

SEQ ID NO: 31761 - DNA, 260 bp, Unknown
  Description of Unknown: RightRegion for integrase B5762 sequence
ggattgagcggaaaaccgaacgggtgttcggataacgcttgccaagctccaccaaaataagacggttcgcgcagcagcgcgggccgtcttattttttatacttattggagtgtggtgaagttggtggcgcacgacatttgggacagatatatacatttattgaatataaaaacgaacattttcaaataaaaaattagaagattgtaaaacatttgatttcattttcaggttctcaaattttcgtttatcgagccgataaa

SEQ ID NO: 31762 - DNA, 260 bp, Unknown
  Description of Unknown: RightRegion for integrase B5763 sequence
atcaaagaggttcgcatatttacagacgaaatccgcatcttttggaaatacgacttataagaccatcgaaaaaccatatttttatgagttataactgataaaatatgggccaactttactctaagtctgccaaaccagaaccacggttgataccatcgactcagattggcagacctgacacgtcatcgcttactatgttaatgcttatttagtgtgcataaaccttagcatattgagtaaaaaatagggaacttaccagc

SEQ ID NO: 31763 - DNA, 260 bp, Unknown
  Description of Unknown: RightRegion for integrase B5764 sequence
aacaaaggcggcacgttgtcggatttcacttacaatgcacctgctttcgctcatcaatgatattctggatatgagccgcatcgaaagcggaaagatccagctggacgagaccgaggtcaacctgtccgacgtgctgcacgacataaagaccatcgtcagcgggcagttttacgcaaagcagctggaattgtatatggacgcgatagatattaccgatgaggacgtctattgcgacaagacccggctgaatcaggttttga

SEQ ID NO: 31764 - DNA, 109 bp, Unknown
  Description of Unknown: RightRegion for integrase B5765 sequence
tgtaatgaatgtaacaagaatgataacaatgttcgtaaagtaaaaatctggtacgcctgagtggaatcgaaccaccgcacgcggctccggaggccgctgctctatccac

SEQ ID NO: 31765 - DNA, 260 bp, Unknown
  Description of Unknown: RightRegion for integrase B5766 sequence
aacaaaggcggcacgttgtcggatttcacttccaatgcaccagttccgtccagccgataaaggtcaccggcagatatgccatgaccacagccagcaccagcgcaatggccagcagaatagctgtcatacgggttttgcacacacgtttcaattccaaacgatacaggttcattttgcttcctccatttcctccgggaacagccacagatacagatcttccagccggggctgtgccgggacgctgtccggcagctgcggtg

SEQ ID NO: 31766 - DNA, 260 bp, Unknown
  Description of Unknown: RightRegion for integrase B5767 sequence
ggcctgatctcacagatccgcgcaaccgacgaacacgtttcgattgagtggaaaatttgacttttacttatccatcgcacacgacaaagggctgtgtgcccttgtcaagcgatgtaacagctgtcattgaagatcaaggagagcattgggtatacaaaaccgcgtggaaagcaatggacaacgatgaagaagcggaaaaaattatggaggcgattaaaaatgctggattatagagcagatcattactgcccggcgtatgg

SEQ ID NO: 31767 - DNA, 260 bp, Unknown
  Description of Unknown: RightRegion for integrase B5768 sequence
gatgataccatagactttgtattcaaagatgggagggagcagatatggcaacggcagtaagaacgattccggctacattaaacaagttcaattctaagccagtttcggctattcagaagagaagggtggcaggttatgcacgtgtatcaactgattttgctgagcaggcgacaagctacgaagcacagatgcagtactataaagcatatatacagagcaagcctgactggatatttgtggatatgtactcagatgagggc

SEQ ID NO: 31768 - DNA, 260 bp, Unknown
  Description of Unknown: RightRegion for integrase B5769 sequence
ttgcttgaggaggccctgggcgaagggttcgacaagcgctcttccggctccaccaaatagtgcaaatccgaactcattctttttcgtgaagcactgtgtcggatttgttttcatagtagaggacgtaggttaaactgcgtcctcttttttgggtgtctcgtaagtaagagcctgtttggaatctccaatgccagcagtggtcgggtcagtcacgataccgagaatcgtgaggactgcgaacagggcatttacgactgcca

SEQ ID NO: 31769 - DNA, 260 bp, Unknown
  Description of Unknown: RightRegion for integrase B5770 sequence
tccaacgacggcgttggcttgaacgtgcacaacatcaagctcgatatttttttcaaatagacatgcatcatattacagctatcgcgttcgccgtgctgatcgccctcgtgttcgccgaggattcgctcatgatgtactaccttgcgccgcagatcaccgacctgtcgttcacgtaccacctcagcgagcgcaacatgtgcgagaacgtggcggtcatcttctgcgcggttccggccatccgctcggccgccgacacgctg

SEQ ID NO: 31770 - DNA, 260 bp, Unknown
  Description of Unknown: RightRegion for integrase B5771 sequence
cgtatagatctggacggggaaaatattgatatacattggagcttttcacctgaggcgtagtaggtggtatatatggaaaaattgcatttcaaagtatcgtcgcctgagagctttattaaactggcctgtacgatgctttttgaaaaaaccgatgagcataaagaatggggttccgtatggaatgaagcgtttgcgggaatccaaggtgaagaattatttttgaaattcacggaggagctttttcctgcaggctgcacaat

SEQ ID NO: 31771 - DNA, 109 bp, Unknown
  Description of Unknown: RightRegion for integrase B5772 sequence
tgtaatgaatgtaacaagaatgataacaatgttcgtaaagtaaaaatttggtacgcctgagtggaatcgaaccaccgcacgcggctccggaggccgctgctctatccac

SEQ ID NO: 31772 - DNA, 260 bp, Unknown
  Description of Unknown: RightRegion for integrase B5773 sequence
aaaggttggtccccccgtcacttcattgtatccgtcgagatagagcctacatatttttgatgtatctaaattgcacagtcttcttcgcagcaggagtcaaacactcttcccgcgtcaacacatactgcctcttttgtgcccgcttgcatatgtttgttgtcaggcatagtaaatccccctattaaaatggtagtgaatgtcttcacttcacccttattttatgcgggagttgttcggctgtgacaaccgctgcccaaaaa

SEQ ID NO: 31773 - DNA, 260 bp, Unknown
  Description of Unknown: RightRegion for integrase B5774 sequence
gatcatatcgacgccaaagcggacggtgaaatcataatacacctcaagcacctcgcttgaggtgtgtttttttatcattttctatcttcctattacgaagctgtcgtggagacggtagcctcataacagtaagatagaaaatcgtaaaaaatgggctataccgatttggtatagccctaaatttatatactgaacttcagcccatcattcgccgccacgaccctcgaagtccgtccgtcatccgccagatgaccccgtag

SEQ ID NO: 31774 - DNA, 260 bp, Unknown
  Description of Unknown: RightRegion for integrase B5775 sequence
ggcctgatctcacagatccgcgcaaccgacgaacacgtttcgattgagtggaaaatttgacttttacttatccatcgcacacgacaaagggctgtgtgcccttgtcaagcgatgtaatcaaagcttgatatttctatatacatttcaatggcacatagccagtcagaagtataccggtattctatcatttcgccgggttcaccacataacctgatatgataacaggaattttcaaagcttttatttcacattaaatgaag

SEQ ID NO: 31775 - DNA, 203 bp, Unknown
  Description of Unknown: RightRegion for integrase B5776 sequence
atcaaagaggttcgcatatttacagacgaaatccgcatcttttggaaatacgacttataagaccatcgaaaaaccatatttttatgagttataactgataaaatatgggcagattttacccaaagtctgccaaaccagaaccacggttgataccatcgactcagattggcagacctgacacgtcatcgcttactatgttaatg

SEQ ID NO: 31776 - DNA, 260 bp, Unknown
  Description of Unknown: RightRegion for integrase B5777 sequence
aacgaatcggagagcagtggttcggatttgaacgcaaatgctccaccacaatttgtctgaaaaccacagttttcagacttttttattgtctattttttatataaatcgtctgaaaaagcaaaaaacaggggcctttcaacccctgtttttccggtttctttcgttaaagtgcgcgacaagagcgcctgcgcccagcagattaatggcgcggcgtagattataggcgaggaagctgagggcgatttcggcgctcaccttct

SEQ ID NO: 31777 - DNA, 100 bp, Unknown
  Description of Unknown: RightRegion for integrase B5778 sequence
tgtaatgaatgtaacaagaatgataacaatgttcgtaaagtaaaaatctggtacgcctgagtggaatcgaaccaccgcacgcggctccggaggccgctgc

SEQ ID NO: 31778 - DNA, 260 bp, Unknown
  Description of Unknown: RightRegion for integrase B5779 sequence
cacgcgccatcggatatgtcagtgcacggttcggattgtctattatatggggagccataaaaagccagtaaacattcgtgtttgctggtttttttatttattaaaaatataatttcataaagcaaatagctcacacggtcgcaaatgcaatcgtgtgagtgttaaccgaaaattttattaatattacatagttgcattgcttttccatttcctttttcaaagagagaataaaatcctctgcatattggactgccccaaaa

SEQ ID NO: 31779 - DNA, 260 bp, Unknown
  Description of Unknown: RightRegion for integrase B5780 sequence
cgtatagatctggacggggaaaatattgatatacattggagcttttcccctgagacgtagttgataggtggtatatatggaaaaattgcatttcaaagtatcgtcgcctgagagctttattaaactggcctgtacgatgctttttgaaaaaaccgacgcgcataaagaatggggttccgtatggaatgaagtgtttgcgggaatccaaggtgaagaattatttttgaaattcacggaggagctttttcctgcaggctgca

SEQ ID NO: 31780 - DNA, 260 bp, Unknown
  Description of Unknown: RightRegion for integrase B5781 sequence
agcctgatttcatcaatcagcgcaaccagcgactatgtaaaaatagagtggaaaatctgatactttttccactctatcaaaccacttgtttctttttatcgcttgtagccccttgtacaccgttgctttaattttattatttctaaaagagcagcattcaaaaccatccttatcaaataataagagagtagaactatcttgtcctactccctctgatacatctatgccagcccaataacgtctgcctattttgggaattt

SEQ ID NO: 31781 - DNA, 109 bp, Unknown
  Description of Unknown: RightRegion for integrase B5782 sequence
attgtttacgatcgggaatccgatactctgaaaattcatttctttttataccactcataatgccggaaacccacgtatttacaggctttccggctattttataggttgt

SEQ ID NO: 31782 - DNA, 260 bp, Unknown
  Description of Unknown: RightRegion for integrase B5783 sequence
ggcctgatctcacagatccgcgcaaccgacgaacacgtttcgattgagtggaaaatttgacttttacttatccatcgcacacgacaaagggctgtgtgcccttgtcaagcgatgtaaccaaagccgaaacggtttgaccctttccacgtttcgggactgcaccttgaaaaatatgcccgcaagacaatggcggtgcatcatagggcaaccggatacgttgctgtctgtatcgagccggacggcgggtgcgccacgatgct

SEQ ID NO: 31783 - DNA, 260 bp, Unknown
  Description of Unknown: RightRegion for integrase B5784 sequence
cgtatagatctggacggggaaaatattgatatacattggagcttttcccctgaggcgtagttgataggtggtatatatggaaaaattgcatttcaaagtatcgtcgcctgagagctttattaaactggcctgtaccattctttttgagcggaaagaggaactgctggaagattacggctctacttggcacgatgtgtttgacggggatgcaggagatcaacattttcagcggttcatggaagacttgtttccgaacggct

SEQ ID NO: 31784 - DNA, 260 bp, Unknown
  Description of Unknown: RightRegion for integrase B5785 sequence
aacaaaggcggcacgttgtcggatttcgcttccaatgcaccaggaacagtatccgaatagtactatcgtagtagctagccgcacaaaaatgcagtatgctgatgcacatgcttttgtaagtggtgatgccgattatgcctcgctggaaatcttaaatgagctcaagcactgctacattctggtgttggaaagggctgcaatagagaaagcgattggtgctaaaatcgagacgcaggaagaatatgaaacattgtctacgc

SEQ ID NO: 31785 - DNA, 260 bp, Unknown
  Description of Unknown: RightRegion for integrase B5786 sequence
atcaaagaggttcgcatatttacagacgaaatccgcatcttttggaaatacgacttataagaccatcgaaaaaccatatttttatgagttataactgataaaatatgggcagattttacccaaagtctgccaaaccagaaccacggttgacaccatcgactggaaggaggagcgcagcgcacagaccatattggatacggtcatacccaagcttcaccccggctgcgtgatactctgccataacaacggatataagataa

SEQ ID NO: 31786 - DNA, 260 bp, Unknown
  Description of Unknown: RightRegion for integrase B5787 sequence
actcgaaccccgaagatcatcgtgctgcgggactatgtcgtcctcagaattgccgtataaagcaaaagagccccggcgggtgccggggctctcttagtctatcatgtatttgctggctgttgtgaccgcgcagcaggctcccaggaatacgagagccgccacgctgatcagggcgatcatgccacgcccaggatcttcttggtcctgttcagaacgtcagcaggatccaggccggagcccttcaccttgccggcgatctc

SEQ ID NO: 31787 - DNA, 260 bp, Unknown
  Description of Unknown: RightRegion for integrase B5788 sequence
ataaaagaggttcgcatatttacagacgaaatccgcatcttttggaaatacgacttataagaccatcgaaaaaccatatttttatgagttataactgataaaatatgggccaactttactctaagtctgccaaaccagaaccacggttgataagcttgattggaaatacaatacttttacgacttatatcaagcgaatgtgcgataagggtcttttaagctatagtcaattgggtagggacaagttttattatcctgcct

SEQ ID NO: 31788 - DNA, 260 bp, Unknown
  Description of Unknown: RightRegion for integrase B5789 sequence
tcggaagccccgccgggttcgtatttggacacgttaggggcaccagaaaaagcgcggtaggatgtgtaaaacattcgccgcgctttttgttatatgttaggctgactacattttgactacaagagcataaaaaataagcggcgggcaatccctgaaaatgagggaaagtccgccgctttaattatggattatttaacttgccggtaacttgccggtaacttgccggtaacttgccggtcagtcgtctttaccgatctgct

SEQ ID NO: 31789 - DNA, 260 bp, Unknown
  Description of Unknown: RightRegion for integrase B5790 sequence
gcaatagagtccggcgtgttcgacgctggactcatcagctccaccacaagtccaccgtagttttaatagaattacggtgggctttttctattctttttctattgtttaggcgctggttacctgctaaaatgaaaatatgcctatgcaagaattttccgagtacctgtacaccgacgaaaagcgcttggaataaattacgttaggaggaaagaaagctaatgtactatcacgcatcatctgttaagggtattacacaacta

SEQ ID NO: 31790 - DNA, 260 bp, Unknown
  Description of Unknown: RightRegion for integrase B5791 sequence
ttgcttgaggaggccctgggcgaagggttcgacaagcgctcttccggctccaccaaatagtgcaaatccgaactcattctttttcgtgaagcactgtgtcggatttgttttcatagtagaggacgtaggttaaattgcgtcctcttttttgggtgtctcgtaagtaagagcctgtttggaatctccaatgccagcagtggtcgggtcagtcacaataccgagaattgtgaggactgcgaacagagcattgacaacagcca

SEQ ID NO: 31791 - DNA, 68 bp, Unknown
  Description of Unknown: RightRegion for integrase B5792 sequence
tcgtataaccatcgtttggtgggactatctgggttcgaaccggagacctcttcgatgtgagcgaagcg

SEQ ID NO: 31792 - DNA, 109 bp, Unknown
  Description of Unknown: RightRegion for integrase B5793 sequence
aacaaaggcggcacgttgtcggatttcgcttccaatgcaccaggaccgcgatggtcataaaatatggcagggccagtacgatctgggacggtatcccaaaattctgcat

SEQ ID NO: 31793 - DNA, 260 bp, Unknown
  Description of Unknown: RightRegion for integrase B5794 sequence
accctgattttcgcctctggaggcttcgccatccagtgcaagagaaatggcaaaatttagctggtaaatcctggtgtaaacaatgtaaacgaaaaatagcgtttttaagacttttctctatatatgtacgtatatgtgcgttatatatgtgtgtatatgtatatttcaatggttttaaaggaattattgtttacattgtttacaagtacctctaagccttgcaacgactgcttagaggtgtaaacgaatttcgtttacat

SEQ ID NO: 31794 - DNA, 109 bp, Unknown
  Description of Unknown: RightRegion for integrase B5795 sequence
ccgaaaggcggtacgttgtcggatttagcactcaatccacctggatcatcatgcggatgatcgtgcggtcggtctcgcgcatgccctcgctcgcaagtgtgccgatgtt

SEQ ID NO: 31795 - DNA, 260 bp, Unknown
  Description of Unknown: RightRegion for integrase B5796 sequence
tcgaaaattcgatttgaattgattggcggaattggctttgtggaacagattatgaggtaagaaaatggtgaaaaatcgaaatataccatttggatattgcatggtgaacggaaaatatgcgttgaacgctcccgaagcagaaacagtacaggaaatatttaaaaaatacataggcggcaagtcgctaaaaacaatagcggcagaaatgaggataccgtataatacgggcaaggcggtttggaataagaacatggtctgcc

SEQ ID NO: 31796 - DNA, 260 bp, Unknown
  Description of Unknown: RightRegion for integrase B5797 sequence
ggcctgatttcttcaatcagcgcaaccagcgactatgtaaagatagagtggaaaatctgacactctttccactctatcaaaccacttgtttctttatactgcttgtagccccttgtacaccgttgcttgcactgcagaaaaaaaccgagtatactcgtattattataggaagtttatctggacaggaagtacatatcatggcagaacgtcgcaagcccacacaccagaaaaagaagcgaagagcgaaacggaaggagagt

SEQ ID NO: 31797 - DNA, 260 bp, Unknown
  Description of Unknown: RightRegion for integrase B5798 sequence
gaaaagactgagtcgggggcggcgatagagccaactctcagaatcagtctcaaaatataagcctctccgccatcatgaagggatgcatttatacaccccttcatgattacagaaacacaagatgtagtagcatcgcggctggcatatacaacatatagggggaaaccgctcggttccccccttttttcgctcaaaatgcccctacacacactagggccagtcatttacaacgcctcaaaacgccttacaataagccatct

SEQ ID NO: 31798 - DNA, 260 bp, Unknown
  Description of Unknown: RightRegion for integrase B5799 sequence
gaaaagactgagtcgggcgcggcgatagaacctacgctccgaatcagtctcaaaatatagcctttcaaccatcatgaggggacgcatttatatacccctccatgattccagaaacacaagatgtcggggcgctttggcagacatatacaacatatagggggaagccgcttggtttcccccttttttcgcttgaaatacccctacacccactagggcctgccatttctaacgccttaaaacgcctctcagcaagccgttta

SEQ ID NO: 31799 - DNA, 81 bp, Unknown
  Description of Unknown: RightRegion for integrase B5800 sequence
ctacagaatcctgtcaagataaagagtggttctataatttattttggggcgctaaagtgaccgtccagatgcgtgtcctct

SEQ ID NO: 31800 - DNA, 260 bp, Unknown
  Description of Unknown: RightRegion for integrase B5801 sequence
tcagcggattgtgctccctctgcgctggggagccacactggacaaaggcgaaccacttaaaaagttcgcctttgtttattttttatcccggaaaacccgtatttggaatcatacttaatcgtgattgatattattgcccatagcttaaaaaagctatgggctttttttattttcggcattcaaggcactatttcggcattcagggcattagtcttgaaatatcctgacgtttattgtaatataaacgtacaaacattctg

SEQ ID NO: 31801 - DNA, 260 bp, Unknown
  Description of Unknown: RightRegion for integrase B5802 sequence
gaaaagactgagtcgggcgcggcgatagaacccacgcttcgaatcagtctcaaaatataatctttccaccatcatgaggggacgcatttatgcacccctccatgattccagaaacataattaaggcggatagctcaagtgctacccgcctttttgctatgcggtgcgtttccacatgtaaactgccagatacggcggcatgttgttgtgcgccttgtttccgccagtgtaaagcgtgttgacgttgccgctgtagccctt

SEQ ID NO: 31802 - DNA, 260 bp, Unknown
  Description of Unknown: RightRegion for integrase B5803 sequence
ctaaacaaaggcggcacgttgtcggatttcgcttccaatgcacctgggtcgcgctgctgattttgcgcagggaagcaatcaacccaaacggcagaaaatccttctgtgccttcttttgcgcctgtataatcagttccagcaccgcttctccgtcgggtcgccggtattccacctggtcaaactgctggtcggtcggctgtaaagcaggctgtagcatacagcctcccagtgtggtcaacagcatcgacaggctcagcagc

SEQ ID NO: 31803 - DNA, 260 bp, Unknown
  Description of Unknown: RightRegion for integrase B5804 sequence
gactcacctcgaccaaataataaaagacatccattagggtgtcttttattttttatataattttaacaggactcgaacttgcggcggaattatccaaatttggcgagtcttgtaaatgctttgaaacaagaattgcatttgacagataaattttaaactaaaacaaaaacgccctcggctgagtaaccaagggcgttttgattgagatacgtagtttttggcatcggactacgtaacattataatatcatttatattatg

SEQ ID NO: 31804 - DNA, 109 bp, Unknown
  Description of Unknown: RightRegion for integrase B5805 sequence
gaaaagattgtttataaaaaagaggaagaaacggttgatatttactattactacctctgaaaaacccttattttatgcgggtttcacgtacttgtatgttgttgctatt

SEQ ID NO: 31805 - DNA, 104 bp, Unknown
  Description of Unknown: RightRegion for integrase B5806 sequence
tccatcgacctgtccgaactttctgcttgtgttcgaacacggtcgcgtaaagtggactagacgggagtcgaacccgtgtccaaaaaccaattccctgtccttct

SEQ ID NO: 31806 - DNA, 260 bp, Unknown
  Description of Unknown: RightRegion for integrase B5807 sequence
aaaaagactgaatcaggtgcagcaatagaaccggaacttgaaatcagtctaaaaatataattcttcaggcatcatgcagggatgcatttatgcgcccctccatgattccagagacataattaaggcggatagctcaagtgctacccgcctttttgctatgcagtgcgtttccacatgtagactgccaagtatggtggcatgttgttgtgggccttgccgccgcccgcgtacatcgtttggacgttgccgccgaatcccct

SEQ ID NO: 31807 - DNA, 260 bp, Unknown
  Description of Unknown: RightRegion for integrase B5808 sequence
gaattatataatacaaattttatatttgcaccagaacctaaaaaagtatgggataagtaataaatttatagtgagggtatgtcatagacaagacctggagttcacgcttcacatggtatggagagaactcactatgatgctttagaaaacaccataaaactaatatatttatatttaacaaggtaaaataagaaaaataattaacaaatttgagtcatctaaaagtgaaaaatacttttaggtgactttttttagattat

SEQ ID NO: 31808 - DNA, 260 bp, Unknown
  Description of Unknown: RightRegion for integrase B5809 sequence
gatttgagcggtcaagctccaccacaagtcaaaaaatccgaacattatcatcaatggtgatacgttcggatttttgatttttatgagttgttttataatttagaaattactgtggtttgtagcatattctcggcctcctccaagccttgcatcacttccgccatgatgcgagtggccaagataaatcctgaactgaacgcttcacactcagtgatgcaggacagttcacttgtgcagtccttgaatttttcaaaggtttc

SEQ ID NO: 31809 - DNA, 260 bp, Unknown
  Description of Unknown: RightRegion for integrase B5810 sequence
ctgtcgaaagacggtaggttatcggattacgcttccaatactccagattggaaatcctaaaatgatctcatcataagcttctacgtttgcatctttatctgcgatggctggacgaattgtcttatcactcatttctacactgcttcgtgattttttatccatccagtttaaatctgcggttgtatatggaatttcaggtttgatctcgtagatgtcagctcctgctgcctctgcgatcttattggctactttttctgtga

SEQ ID NO: 31810 - DNA, 260 bp, Unknown
  Description of Unknown: RightRegion for integrase B5811 sequence
ggaaaaagaaacggtaaaggagtgtataattttaagttgaatatttatttaaagatatagcgtttttttctatatctttttatttctatcatttacgagctaacgaacttgcacacgttgaaattatcagtactctattctatcaacttaccaatggtctaacacctcaagaaattaaagatggtggattagatgcctactttacagatcatactctaggagtttatccaacaaatagtgctggtataccatttagtgca

SEQ ID NO: 31811 - DNA, 260 bp, Unknown
  Description of Unknown: RightRegion for integrase B5812 sequence
ataatttcaagacgatggtctacaaagcgcaagataatggttgagataagggtggaatagcgcaaaacaccctgaaaaagacaaaaaaataataacctaacttggaaattcaagttaggttatttgtggtgaccctaccgaggttcgaactcgggttaccgccgtgaaagggcgatgtcttagaccacttgaccatagggccgtatttcgatttatttgagttcagatggtggaagctacaggactcgaacctgtgaccc

SEQ ID NO: 31812 - DNA, 109 bp, Unknown
  Description of Unknown: RightRegion for integrase B5813 sequence
ctgtcgaaagacggtaggttatcggattacgcttccaatactccagattggaaatcctaaaatgatctcatcataagcttctacgtttgcatctttatctgcgatggct

SEQ ID NO: 31813 - DNA, 260 bp, Unknown
  Description of Unknown: RightRegion for integrase B5814 sequence
tcaaacatcgagggcggcgagttcgacgagggactcgtcaggtccaccaaaacaatataatccgaaccttttgccgattggtcatgggttcggatttgttgtttctgttgaggaaattgaagactggtagctttgtctcgattcttgacacaatgctcaaggtgtacttagcataagacgatatgtgctgcccttactgacctcatggaaacagaaaaagtcgcccggatccattgcgctgcaatggatccgggcggttc

SEQ ID NO: 31814 - DNA, 260 bp, Unknown
  Description of Unknown: RightRegion for integrase B5815 sequence
gatttgagcggtcaagctccaccacaagtcaaaaaatccgaacattatcatcaatggtgatacgttcggatttttgatttttatgagttgttttataatttagaaattactgtggtttgtagcatattctcggcctcctccaagccttgcatcacttccgccatgatgcgagtggccaagataaatcctgaactgaacgcttcacactcagtgatgcagggcagttcacttgtgcagtccttgaatttttcaaaggtttc

SEQ ID NO: 31815 - DNA, 260 bp, Unknown
  Description of Unknown: RightRegion for integrase B5816 sequence
gaaaagactgagtcgggagccgcgattgaaccaacgctccgaatcagtctcaaaatataagtctctccaccatcatgaaggcatgcatttatgcacccctccatgattccagaaacacaagatgttgagggcgcatcaataggtatacacaacatatggggggaaaccgcttggtttcccccttttttgcgctaaatgcccctacacccactagggcctgccatttctaacgccttagaacgccccacagcaagccgtct

SEQ ID NO: 31816 - DNA, 260 bp, Unknown
  Description of Unknown: RightRegion for integrase B5817 sequence
gctggtgatccatcatattcaatatgtacctttttctttcctgcgaaaagtaaaacataaaataaaaatccctccccaccgaaaacggaaaggagggcggagttatataataatttatagttggcgttcgctatttggggcaagtatcgtggaaagctatataggtgaccggtatttaattcctctcatcttctgttcgccgtttagggtatcgcatttcgttacgacccttgccgatggggtaagtttgacttacgtca

SEQ ID NO: 31817 - DNA, 260 bp, Unknown
  Description of Unknown: RightRegion for integrase B5818 sequence
gaaaagactgagtcgggcgcggcgatagaaccaacgctccgaatcagtctcaaaatatagcctttccatcatcatgaagggatgtatttatgcatcccaacatgattccagaaacacaatatgtagcagcatcgctgctggcatatacaacatatagggggaaacttgcgggtttccccctttttcggcgtgaaaatcagggtatagttacacatcctgacacaaaatggggccttagaacgcattacaacaagccgctg

SEQ ID NO: 31818 - DNA, 260 bp, Unknown
  Description of Unknown: RightRegion for integrase B5819 sequence
gaaaagactgagtcgggcgcggcgatagagcccacgcttcgaatcagtctcaaaatataatctttccaccatcatgaggggacgcatttatgcacccctccatgattccagagacataattaaggcggatagctcaagtgctacccgcctttttgctatgcggtgcgtttccacatgtagactgccaagtatggcggcatgttgttgtgagccttgcttccgcccgcgtacatagtctgcacgttgccgccgaatcccct

SEQ ID NO: 31819 - DNA, 260 bp, Unknown
  Description of Unknown: RightRegion for integrase B5820 sequence
aatttcagccgaaaaacaaaagatcggctaaccgttttttcaggaactgtagggatttgaaccaatacgctttctgaaaaagcaaggtgccctttttgaaataaaaaaacaaaagggcaccttttttctgtactaaaaaattcatagtaggaaagaggcacctgtccgctggttttggataccagcagataggtgctttttttcattttcagaattcaaaaagggcgctggaatatcgcaaagagttccggcgccctttt

SEQ ID NO: 31820 - DNA, 109 bp, Unknown
  Description of Unknown: RightRegion for integrase B5821 sequence
tccaaagccctttacgactccaaaacaaaaaccctcaccgtctattattacgcccaataatcattacgaataacaatacggcggtcccgacggcgaattaggtgcgtcg

SEQ ID NO: 31821 - DNA, 260 bp, Unknown
  Description of Unknown: RightRegion for integrase B5822 sequence
atcatcgtggacgacaaaaagcaggtgaaaatcaatctaaaaataacgggcaatttgtaaagaggagctgctttgcatacctacttggtgtagaccgtagaggtcgtcgacccgatgctgctgtgcgcgcactttgccgacaactgcaactgccgctgcggctgcgatcgcggctcgctcggcggtgtgcccgcgggcattctggcagcattcgacgagccaatcatcttcgacgagtccgcgattcgccgcgtgtgcat

SEQ ID NO: 31822 - DNA, 260 bp, Unknown
  Description of Unknown: RightRegion for integrase B5823 sequence
gctggtgatccatcatattcaatatgtacctttttctttcctgcgaaaagtaaaacataaaataaaaatcccttcccaccgaaaacggaaaggagggcggagttatataataatttatagttggcgttcgctatttggggcaagtatcgtggaaagctatataggtgaccggtatttaattcctctcatcttctgttcgccgtttagggtatcgcatttcgttacgacccttgccgatggggtaagtttgacttacgtca

SEQ ID NO: 31823 - DNA, 260 bp, Unknown
  Description of Unknown: RightRegion for integrase B5824 sequence
atcatcgtggacgacaaaaagaaggtgaaaatcaatctaaaaataacgggcaatttgtaaagaggagctgctttgcatacctacttggtgtagaccatagatgtaattgacaccaaatgtgcgtgttggctgtgttattttgcagcgtgtgcgtggggcgtggactcctatttggtgtcgatgacaactgacaatgatactaaataggcatccagccaaattctgcaatttcaatctctgacataagtcaataatccccc

SEQ ID NO: 31824 - DNA, 260 bp, Unknown
  Description of Unknown: RightRegion for integrase B5825 sequence
acacgggagattcatccgaggaatattgaaaaattcaaaaagaagctcatcctatactaattattatgttatcatttaagcgcatacaaataaaaaaaagggccgccaaatggcgacctgtcgcttacttcgaagcaacgtagtattaggataggagtggagagaaaccatactgtacccttattatatgtatacgttttcattttgtcaacactttcagtaaaattgtttgaattaattatatctttcggtaaataagg

SEQ ID NO: 31825 - DNA, 260 bp, Unknown
  Description of Unknown: RightRegion for integrase B5826 sequence
aagccgcaaaagacccgccccatggcgttcacgctggagatcaagctgaaaaatatctaaggttgtcaatcccatgaataggattgacaaccttagaggtaaattaaaaacggcaaaagaacaatctacattgaggcaatatggatcagtcgcactcgataatcttcagcatagtctgatgcggcttcttgctgttgtccaacgcataaaaatacgggaaatcatttccacataagacctcgttaattgcgtagtcccag

SEQ ID NO: 31826 - DNA, 109 bp, Unknown
  Description of Unknown: RightRegion for integrase B5827 sequence
gaaaagattgtctataaaaaagaagaagaaatggtggaaatttactactactacgtctgaaaaatccttattttatgcgggtttcagtcgtttgtatgttgttgctatt

SEQ ID NO: 31827 - DNA, 76 bp, Unknown
  Description of Unknown: RightRegion for integrase B5828 sequence
gaatgttcgcactcatgcgatatggtggaccaccaggggttcgaaccctggacaccctgattaagagtcaggtgct

SEQ ID NO: 31828 - DNA, 260 bp, Unknown
  Description of Unknown: RightRegion for integrase B5829 sequence
atcatcgtggacgacaaaaagcaggtgaaaatcaatctaaaaataacgggcaatttgtaaagaggagctgctttgcatacctacttggtgtagaccgtagatgtaattgacaccaaatgtgcgtgttggctgtgttattttgcagcgtgtgcgtggggcgtggactcctatttggtgtcgatgacaacggctgtcgacccactgctgctgtgcgcgcgcattgtcgactgctcctgcgggaactgctgcgactgcgcagc

SEQ ID NO: 31829 - DNA, 180 bp, Unknown
  Description of Unknown: RightRegion for integrase B5830 sequence
tcaaacattgagggcggcgagttcgacgagggactcgtcggctccaccaaattgtgttgacaaaaaagatgcacagcaaaaatgccgcacgaaagtgcggtgtttttgcgttcaaaagaaaaaacaggcgaattcagaacagaaaagttagattttcaaaaagagggtccgctcactccg

SEQ ID NO: 31830 - DNA, 260 bp, Unknown
  Description of Unknown: RightRegion for integrase B5831 sequence
tggaaagaaaagaaacgattaaaggaggctcaagagcaaaatggaaacgataatcaataatcaacccaaagtggtgagagttgtaaggaaggtatcgtccacgcagataaccgcacaaactatacgggagcagttgacagatacgcgattgcccgttgcggcctatgcaagagtctcaactacaaacgaagagcaggaagacagtcttgaaagacaaagagcgcattacaccgaatatataggaaatcgtcccgaatggc

SEQ ID NO: 31831 - DNA, 260 bp, Unknown
  Description of Unknown: RightRegion for integrase B5832 sequence
ggaaaaagaaacggtaaaggaatgtataattttaagttgaatatttatttaaagatatagagtttttttctatatctttttatttctatcatttacgagctaacgaacttgctcatgttgaaattattagtacccttttctatcaacttaccaatggtctaacacctcaagaaattaaagaaggtggattagatgcttattttactgatcatacattaggtgtctatccaacaaatagtgcgggtattccttttagtgcc

SEQ ID NO: 31832 - DNA, 260 bp, Unknown
  Description of Unknown: RightRegion for integrase B5833 sequence
ctgaaaatcaccttatcaacgcaaaatgtttgcgcttatttggtgccgcggaggcgatagcgtgggacgtatagaatggacaagtatgcatttttctcatgagctcaggcttaggtgtttggcagttgcgtgaatgcaagttgctgaatatgctgccagcgctggtcatgccgcaggttttctaggcgctgatggggctggtgaagtgagctttagagaaaagtctcctttaaagtaaaattatttttaggctcattgta

SEQ ID NO: 31833 - DNA, 260 bp, Unknown
  Description of Unknown: RightRegion for integrase B5834 sequence
gccgacggtagttcggatttggaacgtaattctccaccaaagaaacgacaattttcgtgagaagattgtcgtttctttttgttttgtatgtttatcttttcgtttttctttttttgatttgaaagataacggacacgagaaaaattatgcggaaaccggtttttgtcatcggtaatgcatcatccgattgcagcttttgccgagcaatagcaccgacgccgattgttatcgttttttctgttgtgtattagatttaaaaa

SEQ ID NO: 31834 - DNA, 260 bp, Unknown
  Description of Unknown: RightRegion for integrase B5835 sequence
tctgatatgcttaaagatatgagaaaagatgcgacttctaacacctttgctccaccatagaacgcattagcatttgctagtgcgttttttattgtacattaataattttagttgtataattatgttattacactttaagaggttttattatgaataaggaactagcttacaaattagttaaaaataatgatgaaattcattctttctatcttcttgcagacaaagtatggcacgagtactttccttgtattcttgagaaa

SEQ ID NO: 31835 - DNA, 109 bp, Unknown; identical to SEQ ID NO: 31826
  Description of Unknown: RightRegion for integrase B5836 sequence

SEQ ID NO: 31836 - DNA, 260 bp, Unknown
  Description of Unknown: RightRegion for integrase B5837 sequence
tctgatatgcttaaagatatgaaaaaaggtgcgacttctaacacttttgctccaccatagaacgcattagcatttgctagtgcgtttttttattgtacattaataattttagttgtataattatgttattacactttaagaggttttattatgaataaggaactagcttacaaattagttaaaaataatgatgaaattcattctttttatcttcttgcagacaaagtatggcatgagtactttccttgtattcttgagaa

SEQ ID NO: 31837 - DNA, 260 bp, Unknown
  Description of Unknown: RightRegion for integrase B5838 sequence
ggaaaaagaaacggtaaaggaatgtataattttaagttgaatatttatttaaagatatagcgttttttctatatctttttatttctatcatttacgagctaacgaacttgcacacgttgaaattatcagtactctattctatcaacttaccaatggtctaacacctcaagaaattaaagatggtggattagatgcctactttacagatcatactctaggagtttatccaacaaatagtgctggtataccatttagtgcag

SEQ ID NO: 31838 - DNA, 260 bp, Unknown
  Description of Unknown: RightRegion for integrase B5839 sequence
tcaaacatcgagggcggcgagttcgacgagggactcgtcagctccaccattacaatctaattcgaacatttttgtaacgcttgatgtgttcgggttagtcgttcagattgaacgataaagaaataaccccgctttcctgtaagggaaggcggggttattctcttttcctgctcatagctgcgcggatagcaagcgccgccatgcagtaatttgttattgctccgtttttttgcctgtaaagctccgacaggctcaatccg

SEQ ID NO: 31839 - DNA, 235 bp, Unknown
  Description of Unknown: RightRegion for integrase B5840 sequence
gctggtgatccatcatattcaatatgtacctttttctttcctgcgaaaagtaaaacataaaataaaaatccctccccaccgaaaacggaaaggagggctaaaattatgtgtgtttttgcatttcgctagagttagacagtggaacaccatgaaaacaaaaagataacaaaacattgaaattttgcgtataatatgatatattaacaacaataatattacaaatccagtagatttt

SEQ ID NO: 31840 - DNA, 77 bp, Unknown
  Description of Unknown: RightRegion for integrase B5841 sequence
gaatgttcgcactcatgcgatatggtggaccaccaggggttcgaaccctggacaccctgattaagagtcaggtgctc

SEQ ID NO: 31841 - DNA, 260 bp, Unknown
  Description of Unknown: RightRegion for integrase B5842 sequence
tctgatatgcttaaggatatgaaaaaaggtgcgacttctgccacctttgccccaccatagaacgcattagcatttgctagtgcgttttttcattttacattaataattttagttgtataattgtattatcacacataaagaggttttattatgaataaggaactagcttacaaattagttaaaaataatgatgaaattcattctttttatcttcttgcagacaaagtatggcatgagtactttccttgtattcttgagaa

SEQ ID NO: 31842 - DNA, 260 bp, Unknown
  Description of Unknown: RightRegion for integrase B5843 sequence
ttaaaagctctttatgattccaaaacaaaaaccctcactgtctattattacgcccaataatcattacgaataacaatacggtggtctttatggcagttggttatgatttattcctataccatttataatacagttttctttcaaaagttaattattgttacacatattgacattttttgtattttatgagattatagaaaaaaacagtgaaaggaataaatgtatgattaaaaattctacacacgctaagcaaaaaagcc

SEQ ID NO: 31843 - DNA, 260 bp, Unknown
  Description of Unknown: RightRegion for integrase B5844 sequence
ggaaaaagaaacggtaaaggagtgtataattttaagttgaatatttatttaaagatatagcgttttttctatatctttttatttctatcatttacgagctaacgaacttgcacacgttgaaattatcagtactctattctatcaacttaccaatggtctaacacctcaagaaattaaagatggtggattagatgcctactttacagatcatactctaggagtttatccaacaaatagtgctggtataccatttagtgcag

SEQ ID NO: 31844 - DNA, 260 bp, Unknown
  Description of Unknown: RightRegion for integrase B5845 sequence
acgtctgatttcgtcggcgccctcccgggttcgtatttgggcgggtcaggggtaccatgacgagtgttcttataggatttgatcctttgagaacacccgtcatttttattgtctattttgcgccggttcgtaactgacatagacacctctgcgagtgttgactgttacatcaggcacgggcatggacggggtatccgggataaacagggcgccgacacagttgtagtagatggtcaatttctggacccattcgccgttga

SEQ ID NO: 31845 - DNA, 260 bp, Unknown
  Description of Unknown: RightRegion for integrase B5846 sequence
ctgtcgaaagacggtaggttatcggattacgcttccaatactccagattggaaatcctaaaatgatctcatcataagcttctacgtttgcatctttatctgcgatggctggacgaattgtcttatcactcatttctacactgcttcgtgattttttatccatccagtttaaatctgcggttgtatatggaatttcaggtttgatctcgtagatgtcagctcctgctgcctctgcgatcttattggctactttctctgtga

SEQ ID NO: 31846 - DNA, 260 bp, Unknown
  Description of Unknown: RightRegion for integrase B5847 sequence
tctgatatgcttaaagatatgagaaaaggtgcgacttctagcactcttgctccaccatagaacgcattagcatttgctagtgcgttttttcattgtacattaataattttagttgtataattatgttattacactttaagaggttttattatgaataaggaactagcttacaaattagttaaaaataatgatgaaattcattctttttatcttcttgcagacaaagtatggcatgagtactttccttgtattcttgagaa

SEQ ID NO: 31847 - DNA, 260 bp, Unknown
  Description of Unknown: RightRegion for integrase B5848 sequence
tcaaatatcgagggcggtgagttcgacgagggactcattagctccaccaaaacaatataatccgaaccttttgccgattggtcatgggttcggatttgttgtttctgttgaggaaattgaagactggtagctttgtctcgattcttgacacaatgcttgctgaacagccgtctgctcaaggtgttcttagcataagacgatatgtgctgcccttactgacctcatggaaacagaaaaaatcgcccggatccattgcagcg

SEQ ID NO: 31848 - DNA, 260 bp, Unknown
  Description of Unknown: RightRegion for integrase B5849 sequence
ctaaacaaaggcggcacgttgtcggatttcacttccaatgcaccagattgggaaacctaaaataatctcatcatacccgctgatatcaatcgtattatctgccaattccggacgaatcttcttatcattcatctccacactactgcgtgacttcttatccatccagttcagatctgctttggtatacgcaaccttcggtgtaatctcatatatgtcacaatctgctgcctctgcaatcatctctgccactttccgtgtaa

SEQ ID NO: 31849 - DNA, 109 bp, Unknown
  Description of Unknown: RightRegion for integrase B5850 sequence
gaaaagatagtctataaaaaagaggaagaaatcgtagatatttgctactactacctctgaaaagcccttattttatgcgggtttcacatgcttgtatgttgttgttatt

SEQ ID NO: 31850 - DNA, 76 bp, Unknown
  Description of Unknown: RightRegion for integrase B5851 sequence
gatggttcgttttcagttgatgtggtggaccaccaggggttcgaaccctggacaccctgattaagagtcaggtgct

SEQ ID NO: 31851 - DNA, 260 bp, Unknown
  Description of Unknown: RightRegion for integrase B5852 sequence
atcatcgtggacgacaaaaagaaggtgaaaatcaatctaaaaataacgggcaatttgtaaagaggagctgctttgcatacctacttggtgtagaccatagatgtcatcgacaccaaataggagtccacgccccacgcacacgctgcaaaataacacagccaacacgcacatttggtgtcaattacaacggctgtcgacccgctgctgctgtgcgcgcgcattgtcgactgctcctgcgggaactgctgcgactgcgcagc

SEQ ID NO: 31852 - DNA, 260 bp, Unknown
  Description of Unknown: RightRegion for integrase B5853 sequence
aaaaacggttcggatttggattgccttgttgcaccaaaatgctctaaacgtaaggtttagagcatttttcagcctgtcaaagaacctcaccagcggcggggttcttctggtataatagagaaaagggggattgaatatggagaactggaaaaaggattcccgaaaagacattgttatggtggatgtggatggattagtcccccaagaccatctgctccgaaaagtagaaagggtcatggattatgactggctatatgagc

SEQ ID NO: 31853 - DNA, 260 bp, Unknown
  Description of Unknown: RightRegion for integrase B5854 sequence
aaaaagactgaatcaggtgcagcaatagaaccggaacttgaaatcagtctcaaaatataatctttccaccatcatgaggggatgcatttatgcacccctccatgattccagagacataattaaggcggatagctcaagtgctaccagcctttttgctatgcagtgcgtttccacatgtacacggccagatatggcggcatgttgtcgtgcgccttgttcccgccagcgtacagcgtgttgacgttgccgctgtagccctt

SEQ ID NO: 31854 - DNA, 167 bp, Unknown
  Description of Unknown: RightRegion for integrase B5855 sequence
gaaaagattgtctataaaaaagaagaagaaatggtggaaatttactactactacgtctgaaaaatccttattttatgtgggtttcagtcgtttgtatgttgttgctatttgggtgacacaatggggctcaaaatatctgggagatcaaggctattctgccattgaaa

SEQ ID NO: 31855 - DNA, 260 bp, Unknown
  Description of Unknown: RightRegion for integrase B5856 sequence
gaaaagactgagtcgggcgcagcgatagagcctacgctccgaatcagtctcaaaatataaaccgtccaccatcatgaagggacgcatttatgcacccctccatgattccagaaacacaagatgtagcagcatcacggctgtcacatacaacatataaggggaaaccgcttggtttcccccttttttgctgcgaaaaccaggctatatttacccaccgcgacgatttgaacgccttagaacgcattctgacaagcctctga

SEQ ID NO: 31856 - DNA, 260 bp, Unknown
  Description of Unknown: RightRegion for integrase B5857 sequence
tcctcagcggattgtgctccctctgcgctggggagccaagcaaattttaaggcgaactaaaatcgaggacagagagtaatgtttgttttacttcttttccttggcgttaggtcgccttaaatcgttatttagggcttttttatcgctgttacaattaagagtagtttatttcacaaggaagcagggcttccgtatgcttacgttatgtaagtgtacggaagcccttttttgttgcccgattattcttgataaggtgtgat

SEQ ID NO: 31857 - DNA, 109 bp, Unknown
  Description of Unknown: RightRegion for integrase B5858 sequence
ttgacgattgacaaagtgcttgtctccccgtcccgcccgccggaaatcatctggaaataattgtgtttatttatgcactgtgtatttttatgtctagcgtatctacatc

SEQ ID NO: 31858 - DNA, 260 bp, Unknown
  Description of Unknown: RightRegion for integrase B5859 sequence
gccgacggtagttcggatatgaaacgtaattctccaccaaagaaacgacaattttcgtgagaagattgtcgtttctttttgttttgtatgtttatcttttcgcttttctctttttgatttgaaagataacggacaagagaaaaattatgcggaaaccggtctttgtcatcgataatgcatcatccgattgcagcttttgccgagcaatagcaccgacgccgattgttatcgttttttctgttgtgtattagatttaaaaa

SEQ ID NO: 31859 - DNA, 109 bp, Unknown
  Description of Unknown: RightRegion for integrase B5860 sequence
gccgacggtagttcggatatgaaacgtaattctccaccaaagaaacgacaattttcgtgagaagattgtcgtttctttttgttttgtatgtttatcttttcgcttttct

SEQ ID NO: 31860 - DNA, 260 bp, Unknown
  Description of Unknown: RightRegion for integrase B5861 sequence
gaaacgcaggaaatgactgtggttttgaatgatgatatatcgcttgtaaattgcaaatagattttggatataatataatgtcatcagacacataatatgttccattttggacaaaacaaaacccctgaaagtggaccagactttcaggggttttctattgccaattattaacatatgtactataataccgataacttaataatgaacttaatcagagagccgaagggtgctacgacagttgccggacttacaaaggaagg

SEQ ID NO: 31861 - DNA, 260 bp, Unknown
  Description of Unknown: RightRegion for integrase B5862 sequence
aaaggtgcaaaacccgctgactttaaattggacatttctttgttacctatattcctatagagtgttcattcttatgagtaagactgttcactatataaacaacactccccaccgaaaacggaaaggagggcggagttatataatgaaaaagagttcacttaacaaatttttgttaggtctagggacctaaaggctcgaaagcacaataggccccgatacactattggcaaggcggcactcttgcatctcaggtactcttt

SEQ ID NO: 31862 - DNA, 260 bp, Unknown
  Description of Unknown: RightRegion for integrase B5863 sequence
gccgacggtagttcggatatgaaacgtaattctccaccaaagaaacgacaattttcgtgagaagattgtcgttcctttttgttttgtatgtttatcttttcgtttttcttttttgatttgaaagataacggacaagagaaaaattatgcggaaaccggtctttgtcatcggtaatgcatcatccgattgcagcttttgccgagcaatagcaccgacgccgattgttatcgtttttcctattgtgtattagatttaaaaag

SEQ ID NO: 31863 - DNA, 260 bp, Unknown
  Description of Unknown: RightRegion for integrase B5864 sequence
gccgacggtagttcggatatgaaacgtaattctccaccaaagaaacgacaattttcgtgagaagattgtcgtttctttttgttttgtatgtttatcttttcgtttttctttttttgatttgaaagataacggacaagagaaaaattatgcggaaaccggtttttgtcatcggtaatgcatcatccgattgcagcttttgccgagcaatagcaccgacgccgattgttatcgttttttctattgtgtattaggtttaaaaa

SEQ ID NO: 31864 - DNA, 109 bp, Unknown
  Description of Unknown: RightRegion for integrase B5865 sequence
gccgacggtagttcggatatgaaacgtaattctccaccaaagaaacgacaattttcgtgagaagattgtcgtttctttttgttttgtatgtttatcttttcgtttttct

SEQ ID NO: 31865 - DNA, 109 bp, Unknown
  Description of Unknown: RightRegion for integrase B5866 sequence
aaaagcccgaaatccaagcccggcgactttacacttgaaattatccttaaagacatataaggttgctaatcttatgataaagactgtgttgagagtctaagattttatc

SEQ ID NO: 31866 - DNA, 260 bp, Unknown
  Description of Unknown: RightRegion for integrase B5867 sequence
aaaggagcaaaacccgctgattttcagttggaagtttctttgttacctatattcctctagagcgctcattcttatgataaggattgtcttgaggatttacgcgtatatttttcgcccgcgtcccaggctgtcatcgaccaggccgctcaggtgcgtatgcgtaatgtagacgttctcgtagtatacttagggctggagcctgtaccgttccacaagggcttttactctgtggatatgaccttcttctttgaagtgaccct

SEQ ID NO: 31867 - DNA, 260 bp, Unknown
  Description of Unknown: RightRegion for integrase B5868 sequence
gaaacgcaggaaatgaccgttgtgttaaatgatgatatttcccttgcatattgcaaatagattttggatataatacaatgtcatcagacacataatatgttccattttgaacaaaacaaaccccctgaaagtgggtcagactttcagggggtttctattgccaattattaacatatgtactataataccgataacttaaaatcttaataatgaacttaatcagagagccgaagggtgctacgacagttgccggacttaca

SEQ ID NO: 31868 - DNA, 260 bp, Unknown
  Description of Unknown: RightRegion for integrase B5869 sequence
gaaacgcaggaaatgaccgtggttttgaatgatgatatatcgcttgtaaattgcaaatagattttgcatatgatataatggcatcagacacataatatgttccattttgaacaaaacaaaacctctgaaagcggaccagactttcaggggttttctattgccaattattaacatatgtacttataataccgataacttaataatgaacttaatcagagagccgaagggtgctacgacagttgccggacttacaaaggaag

SEQ ID NO: 31869 - DNA, 260 bp, Unknown
  Description of Unknown: RightRegion for integrase B5870 sequence
cccggagcaaaaccggccggctttgagttagaaatgtatctgaagcctatgtatttataaggaaagctgttttgtacttgcactctctcaatgaaaggccatataatagaagcggaactaaaaatgtactatcataaaggaactgcgggtcgaatatatataagcagtatccataaaatgtaaataaagttatgcttgaacatttcagtttattgaggtataatagttaatatcaaagggtacatattggtctgcacaaa

SEQ ID NO: 31870 - DNA, 260 bp, Unknown
  Description of Unknown: RightRegion for integrase B5871 sequence
aaaggcgcaaaacccgctgactttaaattggaaatttctttgttacctatattcctatagagcgttcattcttatgataaggattgtcttgaggatttacgcgtatatttttcgcccgcgtcccaggctgtcatcgaccaggccgctcaggtgcgtatgcgtaatgtagacgttctcgtagtatacttagggctggagcctgtaccgttccacaagggcttttactctgtggatatgaccttcttctttgaagtgaccct

SEQ ID NO: 31871 - DNA, 260 bp, Unknown
  Description of Unknown: RightRegion for integrase B5872 sequence
gccgacggaagttcggatatgaaacgtaattctccaccaaagaaacgacaattttcgtgagaagattgtcgtttctttttgttttgtatgtttatcttttcgtttttctttttttgatttgagagataactgacaagagaaaaattatgcggaaaccggtttcccttatcggtaatgcatcatccgattgcagcttttccgagcaatagcaccgacgccgattgttatcgttttttctattgtgtattagatttaaaaag

SEQ ID NO: 31872 - DNA, 109 bp, Unknown
  Description of Unknown: RightRegion for integrase B5873 sequence
gccgacggaagttcggatatgaaacgtaattctccaccaaagaaacgacaattttcgtgagaagattgtcgtttctttttgttttgtatgtttatcttttcgcttttct

SEQ ID NO: 31873 - DNA, 260 bp, Unknown
  Description of Unknown: RightRegion for integrase B5874 sequence
gccgacggtagttcggatatgaaacgtaattctccaccaaagaaacgacaattttcgtgagaagattgtcgtttctttttgttttgtatgtttatcttttcgtttttctttttttgatttaaaagacaacggacaagagaaaaaattatgcggaaaccggttattgtcatcggtaatgcatcatccgattgcagcttttccgagcaatagcaccgacgccgattgttatcgttttttctgttgtgtattagatttaaaaa

SEQ ID NO: 31874 - DNA, 260 bp, Unknown
  Description of Unknown: RightRegion for integrase B5875 sequence
gccgacggtagttcggatatgaaacgtaattctccaccaaagaaacgacaattttcgtgagaagattgtcgtttctttttgttttgtatgtttatcttttcgtttttctttttttgatttgaaagataacggacaagagaaaaattatgcggaaaccggtttttgtcatcggtaatgcatcatccgattgcagcttttgccgagcaatagcaccgacgccgattgttatcgttttttctgttgtgtattagatttaaaaa

SEQ ID NO: 31875 - DNA, 260 bp, Unknown
  Description of Unknown: RightRegion for integrase B5876 sequence
gtgatacaaaacagagagtattacggacttaaagatttcagacttataatgcgtatttgatacatacgcagacgatttattccacggtgttcttgacgtgagcctctaaggagcgtgtcggtaggcaaataaaccgccaaccgacagccccaaggggcttttcgtttgcctttggcaagatagcctgacacactcctttctcacgtcaagaacctttcgcggcataaaaccgtctgcaactgctacggacaaagcgatac

SEQ ID NO: 31876 - DNA, 211 bp, Unknown
  Description of Unknown: RightRegion for integrase B5877 sequence
gggagaacgctctacgtcctgcccggcgggcttctgctgcgcgcgaggatggcagcctagtaacggctgccgggcgtcctcgttacgccctcatttgggacacaagtcaagcaaaaaggcccccaccgccgaagtgaactgcctcccatttcttggacatcgagaaatgggaggttttcttatgcgcgtcgatctcagggtgaagcacgat

SEQ ID NO: 31877 - DNA, 109 bp, Unknown
  Description of Unknown: RightRegion for integrase B5878 sequence
aagcctcctcccactttaaaaaataatgaaaatggcaccgaactgccggcaccattttgaaactaacttttgttagttttttttattgtgaaacaacaaggttcccggg

SEQ ID NO: 31878 - DNA, 260 bp, Unknown
  Description of Unknown: RightRegion for integrase B5879 sequence
gaaacgcaggaaatgactgtggttttgaatgatgatatatcgcttgtaaattgcaaatagattttgcatatgatataatggcatcagacacataatatgttccattttgaacaaaacaaaacctctgaaagcggaccagactttcaggggttttctattgccaattattaacatatgtactataataccgataacttaaaatcttaataatgaacttaatcagagagccgaagggtgctacgacagttgccggacttaca

SEQ ID NO: 31879 - DNA, 260 bp, Unknown
  Description of Unknown: RightRegion for integrase B5880 sequence
gccgacggtagttcggatatgaaacgtaattctccaccaaagaaacgacaattttcgtgagaagattgtcgtttctttttgttttgtatgtttatcttttcgtttttctttttttgatttgaaagataacggacaagagaaaaattatgcggaaaccggttttccttatcggtaatgcatcatccgattgcagcttttccgagcaatagcaccgacgccgattgttatcgttttttctattgtgtattagatttaaaaag

SEQ ID NO: 31880 - DNA, 109 bp, Unknown; identical to SEQ ID NO: 31872
  Description of Unknown: RightRegion for integrase B5881 sequence

SEQ ID NO: 31881 - DNA, 109 bp, Unknown
  Description of Unknown: RightRegion for integrase B5882 sequence
gaaacgcaggaaatgaccgttgtgttaaatgatgatatttcccttgcatattgcaaatagattttggatataatacaatgtcatcagacacataatatgttccattttg

SEQ ID NO: 31882 - DNA, 260 bp, Unknown
  Description of Unknown: RightRegion for integrase B5883 sequence
gaaacgcaggaaatgactgttgttttgaatagtgacatatcgcttgtaaattgcaaataggttttgcatatgatataatgtcgtcagacacataatatgttccattttgaacaaaacaaaacccctgaaagtggaccagactttcaggggtttctattgtcaattatttatatatttattataatagcaataatgtaaactcttaataatgaacttaattagagagccgaagggtgctacgacagttgccggacttacaa

SEQ ID NO: 31883 - DNA, 260 bp, Unknown
  Description of Unknown: RightRegion for integrase B5884 sequence
gcgacaggtacgggaaaagacagtgcttgcggacatacactttcaccggctttccgatgatgctttgtcgaactgtgttgttaagacaccaaagcgcgcgggaaacggtcaggctggagacggtatggcttttccccgtcttttcgtcggtaatgacgcatttggccacagcacagacttcgtcgacatccacatcggtgacagtcgccgtgatgcacttccctgttttcttgaggtgttccgctcgtttcctgtcgaac

SEQ ID NO: 31884 - DNA, 260 bp, Unknown
  Description of Unknown: RightRegion for integrase B5885 sequence
gaaagtactgtccccattcaggtacaaatctgtctgtactcaacctcacccgaacaataaaataaatatatttttaagctccttcatcggggcttatttttttgtttcaaaacacgaaagtaaattgactttctaacaaaatctgctataaataaacagattctgttagtttttaacaaaaacgatacagaacagaaataaaattatatatttatagtaaaaggagtcgatttacatggtcaaaagtctattatcaagaa

SEQ ID NO: 31885 - DNA, 260 bp, Unknown
  Description of Unknown: RightRegion for integrase B5886 sequence
gaaacgcaggaaatgactgttgttttgaatagtgatatatcgcttgtaaattgcaaatagatttttcatattatataatgtcattggacaaaagtaaattagtccatgccagacagctaacgaaaaccccgaaagtgtatcagactttcggggtttctattgccaattattaacatctgtactataataccgataactaaaaaacttaataatgaacttaatcagagagccgaagggtgctacgacagttgccggactta

SEQ ID NO: 31886 - DNA, 109 bp, Unknown; identical to SEQ ID NO: 31859
  Description of Unknown: RightRegion for integrase B5887 sequence

SEQ ID NO: 31887 - DNA, 260 bp, Unknown
  Description of Unknown: RightRegion for integrase B5888 sequence
aaaagcccgaaatccaagcccggagactttacacttgaaattatccttaaagacatctaaggttatcaatcttatgataaagactgcgttgagagtctaagattttatcccacacaggcggcacaggaggtgctaagcaccgcgcagatcatcaagggtgggtgcgcagagctgctgtacgtttacaccgatgtagaaccgatcacctttaaccgaggattttactccatagatatgcggtttttctaccgggtgacgct

SEQ ID NO: 31888 - DNA, 109 bp, Unknown
  Description of Unknown: RightRegion for integrase B5889 sequence
gaaacgcaggaaatgaccgtggttttgaatgatgatatatcgcttgtaaattgcaaatagattttgcatatgatataatggcatcagacacataatatgttccattttg

SEQ ID NO: 31889 - DNA, 260 bp, Unknown
  Description of Unknown: RightRegion for integrase B5890 sequence
ttggatagcgaatcagagagcagtggttcggatttgaacgcaaatgctccaccaaattagataccatagattgatacagtgtatccgtctatggtatcgtttttttatgccccgaaatgcccgtatatcaaggctttttgaaacagcgttgtgcatttcctgcccggctgttcccatatgtgccgtttgggaggtgttttcggaggtgttttatgctctcggctaccatctgtagtggtcagtaatcgttaaacgaccgc

SEQ ID NO: 31890 - DNA, 260 bp, Unknown
  Description of Unknown: RightRegion for integrase B5891 sequence
gaaacgcaggaaatgactgttgttttgaacagtgatatatcgcttgtaaattgcaaatagattttgcgtatgtataatatcatcagacacataatatgttctattttgaacaaaacaaatcccctgaaagtataccagactttcaggggatttctaatttatgtattattttttcgtgtcaaatacttatccaatattgttaaaatgttgctattatgaactatcattctatcactctttagtaactcctctgatatatt

SEQ ID NO: 31891 - DNA, 260 bp, Unknown
  Description of Unknown: RightRegion for integrase B5892 sequence
gaagttgttttccatttgaaagaaggaggcgcataccgatggcaaagaccgtgcgggtaatccctgcaagccctaaaatctttcgttctgaggttacggcagaaccaagacggcgaaggacggcaggatatgccagagtttcgaccgatcatgaagaacaggcttccagttacgaaatgcagatggctcattacaagaactacatcgaaagccgtgcagactgggatttcgtcggcatgtattcggacgaggggatcagc

SEQ ID NO: 31892 - DNA, 260 bp, Unknown
  Description of Unknown: RightRegion for integrase B5893 sequence
gggcgaacgctctacgtcctgcccggcgggctgctgctgcgcgcgaggatggcagcctagtaacggcttccgggcatcctcatcgcgccctcggtcgggtagcggaactcgacctcgagccccagccgctccagctcggcagcggcagctcgggcgtttgcgtttgccacgccgtatggcccctcgtctcgcccaaactcgtcgtacatgttcaagcataaaaataggcccccaccgccgaagcgatgggggcctgcggg

SEQ ID NO: 31893 - DNA, 87 bp, Unknown
  Description of Unknown: RightRegion for integrase B5894 sequence
gccgacggtagttcggatatgaaacgtaattctccaccaaagaaacgacaattttcgtgagaagattgtcgtttctttttgttttgt

SEQ ID NO: 31894 - DNA, 93 bp, Unknown
  Description of Unknown: RightRegion for integrase B5895 sequence
atgttaaaagacataagcggtgcgactactaccgacaccgctcagccaaaaaagacctaggcaatagcctaggtctttttcttttgtaaaaat

SEQ ID NO: 31895 - DNA, 87 bp, Unknown
  Description of Unknown: RightRegion for integrase B5896 sequence
gccgacggaagttcggatatgaaacgtaattctccaccaaagaaacgacaattttcgtgagaagattgtcgtttctttttgttttgt

SEQ ID NO: 31896 - DNA, 260 bp, Unknown
  Description of Unknown: RightRegion for integrase B5897 sequence
gccgacggtagttcggatatgaaacgtaattctccaccaaagaaacgacaattttcgtgagaagattgtcgtttctttttgttttgtatgtttatcttttcgtttttctttttttgatttgaaagataacggacaagagaaaaattatgcgaaaaccggttttcgtcatcggtaatgcatcatccgattgcagcttttgccgagcaatagcaccgacgccgattgatatcgttttttctattgtgtattagatttaaaaa

SEQ ID NO: 31897 - DNA, 260 bp, Unknown; identical to SEQ ID NO: 31867
  Description of Unknown: RightRegion for integrase B5898 sequence

SEQ ID NO: 31898 - DNA, 109 bp, Unknown; identical to SEQ ID NO: 31859
  Description of Unknown: RightRegion for integrase B5899 sequence

SEQ ID NO: 31899 - DNA, 109 bp, Unknown; identical to SEQ ID NO: 31881
  Description of Unknown: RightRegion for integrase B5900 sequence

SEQ ID NO: 31900 - DNA, 260 bp, Unknown
  Description of Unknown: RightRegion for integrase B5901 sequence
tcctcagcggattgtgctccctctgcgctggggagccaagctaattttaaggcgacctaaacgagaggtcagagagtaatgtttgttaaactctttttcctcggtgttaggttgccttaaattgttttatatggcagttttcatcattgcagcaagagtattgttttatttatagtatggaagcagggcttccgtatgcttacgtttatgtaagtgtacggaagcctttttttattgtctaaacgaaaggaaagaacgaa

SEQ ID NO: 31901 - DNA, 260 bp, Unknown
  Description of Unknown: RightRegion for integrase B5902 sequence
gctgacggtagttcggatatgaaacgtaattctccaccaaagaaacgacaattttcgtgagaagattgtcgtttctttttgttttgtatgtttatcttttcgcttttctctttttgatttgaaagataacggacaagagaaaaattatgcggaaaccggtctttgtcatcgataatgcatcatccgattgcagcttttgccgagcaatagcaccgacgccgattgttatcgttttttctgttgtgtattagatttaaaaa

SEQ ID NO: 31902 - DNA, 260 bp, Unknown
  Description of Unknown: RightRegion for integrase B5903 sequence
tttaaatctgacacggaaaaactattggatttcatgaactccgaaagggaagaagaataaagccgggataatgcttcacctcctcggcaggacttatacgatatctccgagttaaacaaggagatatcatgagaagaattgacttgatttttattatcagtcttgcgttgttgtgtagtatcaatgtttaatcaaagggagcatatgctccctttttcatttatagctatcgtaagttccagttcttagaacttcggtaa

SEQ ID NO: 31903 - DNA, 260 bp, Unknown
  Description of Unknown: RightRegion for integrase B5904 sequence
aataaaaatcaaaaaaatgatgactttgatataaagttattccctaaaatttacgtctaacatgattaacttatttcattaccttctttatcaacgcctatcggatcatgtaaaaatgtttctcctttttgttttttactacttctaaagagcattaaaatttcattttcaatgcatctagatgcatatgtagctaatcttgttccctttgatgcatcaaatgaatcaattgctttaattaaccctactgtaccgattga

SEQ ID NO: 31904 - DNA, 260 bp, Unknown
  Description of Unknown: RightRegion for integrase B5905 sequence
aatgatgaatacaggggcagtaagtatccaagagacgttattatcgtagctgcaaaataatgatgtgtctattgtgtacgtcggcacattagttccctgggcattaattccagctgcagcgatttgtaatgtcagtccatttgagttagcacgtcgaaacttcatcccagttgtcattggtctagttgtcacgacgatagttgcgatgtttattttataaaaagtaaaacgcttggaagattaactctccaagcgttttt

SEQ ID NO: 31905 - DNA, 260 bp, Unknown
  Description of Unknown: RightRegion for integrase B5906 sequence
aaatggtgcgcccttaaggacctcatcgaacggaagttcttccattttaaaatagcataatccgtgagacagattatattttatctctaaaaccataaggaggtaaaatatggcaaaaatgtcgcttgatcctcgcaatgcgcgggtacatgacaagaagaatgaaaacgctattgcgcaatcactcaggaagaacggtgcggggagatcgattgtcatcgattcggaaaacgtcatcatcggagggaacggagttttcg

SEQ ID NO: 31906 - DNA, 247 bp, Unknown
  Description of Unknown: RightRegion for integrase B5907 sequence
aatatcacctggaacaaagccgccaacaccctcaccatccactaccgcctcgtcctttagtcatgctcattttatggttaattgatatatggaggcccggacggcgagctcggcgcgtcgctgcgctacctctcccagcgctactccatgccctaccccgagctcaagggcctgctgaccgacatcggcacagaggagctggggcatctcgagatggtcggcacgatcgttcaccagcttacgcgca

SEQ ID NO: 31907 - DNA, 260 bp, Unknown
  Description of Unknown: RightRegion for integrase B5908 sequence
aaaggatggaaagaaaaaaaacgattaaaggaggcacagacgaatggaagcagcaattgacactgtccaacaaccgagagtagtcagggtggtaagaaacgtagcgacagcaccattaacggcacaaaagataagagagcagatgatcgatacgcgactccccgttgccgcttatgcgagagtttcgaccacgaacgaagagcaagaggacagtcttgaacgacagaaagcacactacaccgagtacattggcaatcgcc

SEQ ID NO: 31908 - DNA, 137 bp, Unknown
  Description of Unknown: RightRegion for integrase B5909 sequence
gtcatttattacaagaaaactaaggaagatggtatcagtcttgatattatactgctataggttggtatcatcgtgtaccttgttcatgtgttaatacatcaacatctccactagtaccattgaaattagagaagata

SEQ ID NO: 31909 - DNA, 260 bp, Unknown
  Description of Unknown: RightRegion for integrase B5910 sequence
cgtatagatctggacggggaaaatattgatatacattggagcttttcccctgaggcgtagttgataggtggtatatatggaaaaattgcatttcaaagtatcgtcgcctgagaactttattaaactggcctgtaccattctttttgagcggaaagaggaactgctggaagattacggctctacttggcacgatgtgtttgacggggatgcaggagatcaacattttcagcggttcatggaagacttgtttccgaacggct

SEQ ID NO: 31910 - DNA, 260 bp, Unknown
  Description of Unknown: RightRegion for integrase B5911 sequence
atctgctcgttcgggacgattgttcttcttagaataccacgcactaggcttgcggcataatcgcctggtcaccgtgctcgtcgaggtacggcatgaggtacacgccgccctcgtctgtcgtgagcagaaggtactcgcggttgagcttatcgcacacgatttcctgatgcacgccatccggcaaatcgtaaatcgggccatcggttcgcgcgggcgataccgtcatgtcctgcgcccccatggcctgcctggcgcacgag

SEQ ID NO: 31911 - DNA, 260 bp, Unknown
  Description of Unknown: RightRegion for integrase B5912 sequence
aatatcacctggaacaaagccgccaacaccctcaccatccactaccgcctcgtcctttagccatgctcattttatggttaattgatatatggaggcccggacggcgagctcggcgcgtcgctgcgctacctctcccagcgctactccatgccctaccccgagcttaagggcctgctgaccgacatcggtacagaggaagcgtcatggcccccaattttggcacggtatttttccagtccgtccagcacatagacccattt

SEQ ID NO: 31912 - DNA, 109 bp, Unknown
  Description of Unknown: RightRegion for integrase B5913 sequence
gtatttgaccgtgctaccggttccgtgaatatcttcttttatctcgcaaactgcccataaacagcaggctttttaaagttggtacgcaaatgacaaaaggtcatccagt

SEQ ID NO: 31913 - DNA, 260 bp, Unknown
  Description of Unknown: RightRegion for integrase B5914 sequence
aatatcacctggaacaaagccgccaacaccctcaccatccactaccgcctcgtcctttagtcatgctcattttatggttaattgatatatggcggccgatatcccacttatccataaagaaagcgcctcgcgatagggcgctttctttatggataaatttgacaaaccgcaaaaattcctatatggtgtccctatactcccgccgaaataaaaacgaaagagggatattgtgggcctgcttgattttttgtcatcctact

SEQ ID NO: 31914 - DNA, 260 bp, Unknown
  Description of Unknown: RightRegion for integrase B5915 sequence
aatatcacctggaacaaagccgccaacaccctcaccatccactaccgcctcgtcctttagtcatgctcattttatggttaattgatatatggaggcccggacggcgagctcggcgcgtcgctgcgctacctctcccagcgctactccatgccctaccccgagcttaagggcctgctgaccgacatcggtacagaggaagcgtcatggcccccaattttggcacggtatttttccagtccgtccagcacatagacccattt

SEQ ID NO: 31915 - DNA, 260 bp, Unknown
  Description of Unknown: RightRegion for integrase B5916 sequence
aatatcacctggaacaaagccgccaacaccctcaccatccactaccgcctcgtcctttagccatgctcattttatggttaattgatatatggaggcccggacggcgagctcggcgcgtcgctgcgctacctctcccagcgctactccatgccctaccccgagctcaagggcctgctgaccgacatcggcaccgaggaagcgtcatgaaccccaattttggcgcggtatttttccagtccgtccagcacatagacccattt

SEQ ID NO: 31916 - DNA, 260 bp, Unknown
  Description of Unknown: RightRegion for integrase B5917 sequence
gatttggacttatcaagtccaccacaagtcaaaaaatccgaacattatcatcaatggtgatacgttcggatttttgatttttatgagttgttttataatttagaaattactgtggtttgtagcatattctcggcctcctccaagccttgcatcacttccgccatgatgcgagtggccaagataaatcctgaactgaacgcttcacactcagtgatgcaggacagttcacttgtgcagtccttgaatttttcaaaggtttc

SEQ ID NO: 31917 - DNA, 260 bp, Unknown
  Description of Unknown: RightRegion for integrase B5918 sequence
aatatcacctggaacaaagccgccaacaccctcaccatccactaccgcctcgtcctttagtcatgctcattttatggttaattgatgtatggaggcccggacggcgagctcggcgcgtcgctgcgctacctctcccagcgttactccatgccctaccccgagctcaagggcctgctgaccgacatcggcacggaggagctggggcatctcgagatggtcggcacgatcgttcaccagcttacgcgcaatttgaccgagga

SEQ ID NO: 31918 - DNA, 260 bp, Unknown
  Description of Unknown: RightRegion for integrase B5919 sequence
ctatacaaactttatgttacgccgtttgctattttcattcgtgcagcactcataaaataaaaaaacaccgccttaccggacgacatccgatagggcggtgttgcattagaataaagtaaaatttgcgacaagtacaatataccattctttttatgatttgtcaataaaattgcttgtcgaattttgtcgatgaaaattatagcttttcgtccaacgaagccacatgcttcaaaatctgctgcagcgtagattcttcggtg

SEQ ID NO: 31919 - DNA, 260 bp, Unknown
  Description of Unknown: RightRegion for integrase B5920 sequence
cagcagcgcactgaccttgctgaatttgatgaaaccttggttaaacgctggctcaagtaaatcaccgtctgggaagaccacttcacagtggagctcaagtccggactaaaaattgatattgaaggataatgactatagacgcacgaaaccctctcgaccttgaattggccgggagggttgttttttattcgtctttaaggactactattgttgaatcacttaagtaaggatagtaattaaacttttcatctccacatatg

SEQ ID NO: 31920 - DNA, 260 bp, Unknown
  Description of Unknown: RightRegion for integrase B5921 sequence
aatatcacctggaacaaagccgccaacaccctcaccatccactaccgcctcgtcctttagccatgctcattttatggttaattgatatatggaggcccggacggcgagctcggcgcgtcgctgcgctacctctcccagcgctactctatgccctaccccgagctcaagggcctgctgaccgacatcggcacagaggagctggggcatctcgagatggtcggcacgatcgttcaccagcttacgcgcaatttgaccgagga

SEQ ID NO: 31921 - DNA, 260 bp, Unknown
  Description of Unknown: RightRegion for integrase B5922 sequence
agtcggcaaactattttatgtacaacatttcattatttttgcaaaaagaaaatagtataataggggacacataaaaaaatgaaaccgccttaccggatgacatccgatagggcggttttgcattagaataaagtaaaatttgcgacaagtacagtataccatactttttcatgatttgtcaataaagttgcttgccgaattttgtcgatgaaaattatagctttgcatccagagaagccacatgcttcagaatttgcttc

SEQ ID NO: 31922 - DNA, 73 bp, Unknown
  Description of Unknown: RightRegion for integrase B5923 sequence
cagtgttcgcctagaaatgttctggtggatcatcaggggttcgaaccccggacaccctgattaagagtcaggt

SEQ ID NO: 31923 - DNA, 260 bp, Unknown
  Description of Unknown: RightRegion for integrase B5924 sequence
gtatttgaccgtgctaccggttccgtgaatatcttcttttatctcgcaaactgcccataaacagcaggctttttaaagttggtactcaaatgacaaaaggtcatccagttcgggcaagagaccctgtcaccgtcacaatactgcgttaagatcggctgtcttacatttggtctcgacagataatttacaaacatctcatcgacaatccttgaaatattagaaaaaatattccgtccaaatacccacttatggtcaaatgc

SEQ ID NO: 31924 - DNA, 260 bp, Unknown
  Description of Unknown: RightRegion for integrase B5925 sequence
aatatcacctggaacaaagccgccaacaccctcaccatccactaccgcctcgtcctttagccatactcattttatggttaattggtatatggaggcccggacggcgagctcggcgcgtcgctgcgctacctctcccagcgctactccatgccctaccccgagctcaagggcctgctgaccgacatcggcacagaggaagcgtcatggaccccaattttgtcgcggtatttttccggtccgtccagcacatagacccattt

SEQ ID NO: 31925 - DNA, 260 bp, Unknown
  Description of Unknown: RightRegion for integrase B5926 sequence
gtttcggtaaaatgttcggattccgaaagtgtgggtctgccaaaaaggtcggttgcataagcagccgatttttttattcgcttcttgcagaaggacgagaataggacggcagtgaataccgtgccctttggcacggtagagccgtcctgaccgacgagcgtcgagcgaggagaaagagtccttctgcccctgccaaaaaggtcggctgcgaaagcagccgattttttttctctctttgtagaaggacatttttccaattc

SEQ ID NO: 31926 - DNA, 260 bp, Unknown
  Description of Unknown: RightRegion for integrase B5927 sequence
atggaatatgataaggagagggatgagtatagtttttattacaagtttgaaatggaatagtttttctacaaacgtagtgaatactatacaatacacaagtttcaaaatcaacgtatttccgttgtttttggttttcataactctcagctatacggtggacccgatggagaattaggcgctgccatgcgttacctttcccagcgctattccaacacaaaccgaaaagtagccggtgtgcttacggatatcggtaccgagga

SEQ ID NO: 31927 - DNA, 260 bp, Unknown
  Description of Unknown: RightRegion for integrase B5928 sequence
ccagagggcaatggttcggatttaggttgcttcgctccaccaaaaaagttcaacgtatgaaagtgcgttgaactttttgttttgcacaattttccggcggacacagcgggtggatgagaacagctgcggcggtcagctggatctgcagggcggtggcggcggacttctcccggttgatttccgcgccgttctcctgcatgagccagttcagctgttcgtcggtgatgccggggatcttgttcttcacgtcttcgcgtttc

SEQ ID NO: 31928 - DNA, 109 bp, Unknown; identical to SEQ ID NO: 31912
  Description of Unknown: RightRegion for integrase B5929 sequence

SEQ ID NO: 31929 - DNA, 260 bp, Unknown
  Description of Unknown: RightRegion for integrase B5930 sequence
agccggcaaactattttatgtacaacatttcattatttttgcaaaaagaaaatagtataataggggacgcataaaaaaatgaaaccgccttaccggatgaatccgatagggcggttttgcattagaataaagtaaaatttgcgacaagtacagtataccatactttttcatgatttgtcaataaagttgcttgtcgaattttgtcgatgaaaattatagctttgcatccagagaagccacatgcttcagaatttgctgta

SEQ ID NO: 31930 - DNA, 260 bp, Unknown
  Description of Unknown: RightRegion for integrase B5931 sequence
ccggatgaaaaaacgacgctatccgatagttcggataacgtcgatcttggtggagcataggagactcgaactcctgaccccaacactgccagttatgcatttatactttttctaggctcatctaagctcattgaaccctatattttaaagggtttgttaaaattcaaactcatctaagctcatctaaaaccatcgtaattactgtcaaaactactgtcaaaagttagaactaactaactaatatttaaatggttatatag

SEQ ID NO: 31931 - DNA, 260 bp, Unknown
  Description of Unknown: RightRegion for integrase B5932 sequence
gtcatttattacaagaaaactaaggaagatggtatcagtcttgatattatactgctataggttggtatcatcgtgtaccttgttcataaggcacacgatgatataaacacatatatttatgtttaaaagtgatataatataggtgcgtgaagtgggtacacgcagagcatcttttttgtcagttctcctatatattttctctaaaaagggtggtatgagccaccttttttagttgtatgcatttatagctcatttaaagc

SEQ ID NO: 31932 - DNA, 260 bp, Unknown
  Description of Unknown: RightRegion for integrase B5933 sequence
aatatcacatggaacaaagccgccaacaccctgaccgtccactaccgcctcgtcctttagcctgcctattttatggttaattggtattaggtggcccagacggagaattgggtgcatcgctgcgctatctttcccagcgctactccatgccctaccccgaactcaagggactgctgaccgacatcggtacagaggagctgggacatcttgagatggttggcaccatcgtccaccagctcacgcgcaatctgacggaggag

SEQ ID NO: 31933 - DNA, 260 bp, Unknown
  Description of Unknown: RightRegion for integrase B5934 sequence
gacctctcaaacattgagggcggcgagttcgacgagggactcgtcagctccaccaaatagtgcaaatccgaactcattctttttcgtgaagcactgtgtcggatttgttttcatagtagaggacgtaggttaaactgcgtcctcttttttaggtgtctcgtaagtaagagcctgtttggaatctccaatgccagcagtggtcgggtcagtcacgataccgagaatcgtaaggactgcgaacagggcattgacaacagcca

SEQ ID NO: 31934 - DNA, 260 bp, Unknown
  Description of Unknown: RightRegion for integrase B5935 sequence
actatcgcatggaacaaagccgccaacaccctgaccgtccactaccgcctcgtcctttagcctgccatttttatggttaattggtatccggtggcccagacggagaattgggtgcatcgctgcgctatctttcccagcgctactccatgccctaccccgaactcaagggactgctgaccgacatcggcacagaggaagcgtcatggcccccaattttggcgcggtatttttccagtccgtccagcacatagacccatttg

SEQ ID NO: 31935 - DNA, 260 bp, Unknown
  Description of Unknown: RightRegion for integrase B5936 sequence
aatatcacatggaacaaagccgccaacaccctgaccgtccactaccgcctcgtcctttagcctgtcatgtttatggttaattggtatatggaggcccagacggggagcttggtgcatcgctgcgctatctttcccagcgctactccatgccctaccccgaactcaagggactgctgaccgacatcggtacagaggaagcgtcatgaaccccaattttgtcgcggtatttttccagtccgtccagcacatagacccacttg

SEQ ID NO: 31936 - DNA, 260 bp, Unknown
  Description of Unknown: RightRegion for integrase B5937 sequence
ttgatgatttccgcaatttacgccacaagcgaaagtatcaacatcgtttggaagatatgacggcgcataagcgccgccatacaacgcaacctttcgccctttgtaaactaagctacagagaaatttatatgaaaggaattgataccagctattattacgaaggatataccgtttataaagcggaagaactctaaagaaaaagatgagataaccgattttttagaaaaaaataaagcgaaaaattaagaattaaaaatatt

SEQ ID NO: 31937 - DNA, 260 bp, Unknown
  Description of Unknown: RightRegion for integrase B5938 sequence
ctatacaaactttatgttacgtcgtttgctattttcattcgtgcagcactcataaaataaaaaaatgccgccctatcggatgtcgtccggtaaggcggtttcactatttctattctggatacggttcggatttacagcttttcgtctatgtttgccacgtgcttcagaatctgctgcagcgtggattcttcggtgtctggttcgggtgttggctctggttctggctcggtcggctgcgttgttttcgtgaatccgtttaa

SEQ ID NO: 31938 - DNA, 109 bp, Unknown
  Description of Unknown: RightRegion for integrase B5939 sequence
aatatcacatggaacaaagccgccaacaccctgaccgtccactaccgcctcgtcctttagcctgtcatgtttatggttaattggtataaggaggcccggacggcgagct

SEQ ID NO: 31939 - DNA, 260 bp, Unknown
  Description of Unknown: RightRegion for integrase B5940 sequence
atggaatatgataaggagagggatgagtatagtttttattacaagtttgaaatggaatagtttttctacaaacgtagtgaatactatacaatacacaagtttcaaaatcaacgtatttccgttgtttttggttttcataactctcagctatacggcggacccgatggagaattaggcgctgccatgcgttacctttcccagcgctattccaacacaaaccgaaaagtagccggtgtgcttacggatatcggtaccgagga

SEQ ID NO: 31940 - DNA, 260 bp, Unknown
  Description of Unknown: RightRegion for integrase B5941 sequence
aatatcacctggaacaaagccgccaacaccctcaccatccactaccgcctcgtcctttagtcatgctcattttatggttatttgatatatggaggcccggacggcgagctcggcgcgtcgctgcgctacctctcccagcgctactctatgccctaccccgagctcaagggcctgctgaccgacatcggtacggaggagctggggcatctcgagatggtcggcacgatcgttcaccagcttacgcgcaatttgaccgagga

SEQ ID NO: 31941 - DNA, 260 bp, Unknown
  Description of Unknown: RightRegion for integrase B5942 sequence
attttcgaaaagctagcatacaacccgtttgaagatactctagatatttattttaattagtatcggttctgtatccagaggacaccctcttgaagcctcataatatactatcttattatctaaattttcatcttcttcatagggaaatattaattcattcatattcataagaggcctttttccatttgatattacttcaccatcagctttgtaatataaacttcttattgagtttatttctctttctcctaatttatatt

SEQ ID NO: 31942 - DNA, 68 bp, Unknown
  Description of Unknown: RightRegion for integrase B5943 sequence
cctaattctacgctggtggaggcgcggagaatcgaactccggtccacgaaagccccctgattggcatc

SEQ ID NO: 31943 - DNA, 142 bp, Unknown
  Description of Unknown: RightRegion for integrase B5944 sequence
gggagcaatgaaaaagtagaagttgaaatttacattcaatccaatatcatacaaaaataatccttaaaaaagtcctttcaaacaagggctttttttattgtaaacattcaaaccctttaatcttttttaatctttgttttgt

SEQ ID NO: 31944 - DNA, 260 bp, Unknown
  Description of Unknown: RightRegion for integrase B5945 sequence
taccgcctaaacaaaggcggcacgttgtcggatttcacttccaatgcacctgcattgtagaatcccgaaaacttccagataatcaatattatcggaagttgtatgccgcaacgacctttaaggttaaactactccaattattactataccacgacttgattcggtgggcaacaagacaataccagtatttttccgaaatactcttaatatcttccaaacatgaaaagcacccctgccaatccatgtgtcatcgcacattt

SEQ ID NO: 31945 - DNA, 260 bp, Unknown
  Description of Unknown: RightRegion for integrase B5946 sequence
ctatacaaactttatgttacgccgtttgctattttcattcatgcagcactcataaaataaaaaaataccgccctatcggatgtcgtccggtaaggcggtttcactatttctattctggaaacggttcggatttacagcttttcgtctatgtttgccacgtgcttcagaatctgctgcaacgtagattcttcggtgtccggttcaggtattggtgttggctctggttcagttggttgcgttgcttttgcaaatccattcaa

SEQ ID NO: 31946 - DNA, 260 bp, Unknown
  Description of Unknown: RightRegion for integrase B5947 sequence
ctatacaaactttatgttacgccgtttgctattttcattcgtgcagcactcataaaataaaaaaataccgccctatcggatgtcgtccggtaaggcggtttcactatttctattctggaaacggttcggatttacagcttttcgtctatgtttgccacatgcttcagaatttgcttcagcgtggattcttcggtgtccggttcagtcgtctgcgttgctttcgtgaatccgtttaatccggcattctgtatcatggttgg

SEQ ID NO: 31947 - DNA, 260 bp, Unknown
  Description of Unknown: RightRegion for integrase B5948 sequence
aatatcacctggaacaaagccgccaacaccctcaccatccactaccgcctcgtcctttagtcatgctcattttatggttaattgatatatggaggcccggacggcgagctcggcgcgtcgctgcgctacctctcccagcgctactccatgccctaccccgaactcaagggcctgctgaccgatatcggcacagaggagctggggcatttggagatggtcggcacgatcgtccaccagctcacgcgaaatctcacggagga

SEQ ID NO: 31948 - DNA, 260 bp, Unknown
  Description of Unknown: RightRegion for integrase B5949 sequence
aatatcacatggaacaaagccgccaacaccctgaccgtccactaccgtctcgtcctttagcctgccatttttatggttaattggtatcaggtggcccagacggagaattgggtgcatcgctgcgctatctttcccagcgctactccatgccctaccccgaactcaagggactgctgaccgacatcggcacagaggaagcgtcatggccccctatttttgcccggtatttttccagtccgtccagtacatagacccacttg

SEQ ID NO: 31949 - DNA, 260 bp, Unknown
  Description of Unknown: RightRegion for integrase B5950 sequence
atggaatatgataaggagaaggatgagtatagtttttattataagtttgaagcggaatagtttttctacaaacatagtgaatactatacaatacacaagtttcaaaatcaacgtatttccattgtttgtggcttttataactctcagctatgcggtggacccaatggagaattaggcgctgccatgcgttacctttcccagcgctattccaacacaaaccgaaaagtagccggtgtgcttacggatatcggtaccgagga

SEQ ID NO: 31950 - DNA, 260 bp, Unknown
  Description of Unknown: RightRegion for integrase B5951 sequence
aatatcacatggaacaaagccgccaacaccctgaccgtccactaccgcctcgtcctttagcctgcctattttatggttaattggtattaggtggcccagacggagaattgggtgcatcgctgcgctacctctcccagcgctactccatgccctaccccgagctcaagggcctgctgaccgacatcggtacagaggaagcgtcatggcccccaattttggcgcggtatttttctagtccgtccagcacatagacccacttg

SEQ ID NO: 31951 - DNA, 260 bp, Unknown
  Description of Unknown: RightRegion for integrase B5952 sequence
atggaatatgataaggagaaggatgagtatagtttttattataagtttgaagcggaatagtttttctacaaacatagtgaatactatacaatacaaaagttccaaaaacaacgtatttccgttgtttttggcttttataactctcagctatacggtggacccgatggagaattaggcgctgccatgcgttacctttcccagcgctattccaacacaaaccgaaaagtagccggtgtgcttacggatatcggcaccgaaga

SEQ ID NO: 31952 - DNA, 260 bp, Unknown
  Description of Unknown: RightRegion for integrase B5953 sequence
ctatacaaactttatgttacgccgtttgctatttttattcgtgcagcactcataaaataaaaaaagcttgcattttttctttgattatggtatactatagttatagaattgcggtggacgtcttcggactgcacctaaaggagccagatgcgtctgactcctttttctttatatactcataaaataaaaaaataccgccctatcggatgtcgttcggtaaggcggtttcactatttctattctggatacggttcggattt

SEQ ID NO: 31953 - DNA, 260 bp, Unknown; identical to SEQ ID NO: 31783
  Description of Unknown: RightRegion for integrase B5954 sequence

SEQ ID NO: 31954 - DNA, 260 bp, Unknown
  Description of Unknown: RightRegion for integrase B5955 sequence
aaaggatggaaagagaaaaaacgattaaaggaggcacagacgaatggaagcagcaattgacactgtccaacaaccgagagtagtaagggtggtaagaaacgtagcgacagcaccattaacggcacaaaagataagagagcagatgatcgatacgcgactcccagttgccgcttatgcgagagtttcgaccacgaacgaagagcaagaggacagtcttgaacgacagaaaacacactacaccgagtacatcggcaatcgcc

SEQ ID NO: 31955 - DNA, 260 bp, Unknown
  Description of Unknown: RightRegion for integrase B5956 sequence
gtatttgaccgtgctaccggttccgtgaatatcttcttttatctcgcaaactgcccataaacagcaggctttttaaagttggtacgcaaatgacaaaaggtcatccagttcgggcaagagaccctgtcaccgtcacaatactgcgttaagatcggctgtcttacatttggtctcgacagatagttcacaaacatctcatcgacaatccttgagatattagaaaaaatattccgtccaaatacccatttatggtcaaatgc

SEQ ID NO: 31956 - DNA, 260 bp, Unknown
  Description of Unknown: RightRegion for integrase B5957 sequence
catcaggtatgcattgccgttttcggcaaaagcatattgctgagaataactttcggctagtcatcggtcaacagtcttcatcatatcgtcccgcccgaaaagcagagcatgggcgatttcacgctaacttgaattctagtacttgatcttctgcccgacgtagatgcgattcgggttcgaaatcccgttcttgttggcgaggcccgcccagttggagccccagccgaccttctgggcgatgccggacagcgtgtcgccgg

SEQ ID NO: 31957 - DNA, 260 bp, Unknown
  Description of Unknown: RightRegion for integrase B5958 sequence
ccagagggcaatggttcggatttgggttgcttcgctccaccaaaaaagttcaacgtatgaaagtgcgttgaactttttgttttgcacaattttccggcggacacagcgggtggatgagaacagctgcggcggtcagctgggtctgaagggcggtggtggcggacttctcccggttgatgtccgcgccgttctcctgcatgagccagttcagctgctcgtcggtgatgccgggaatcttgttcttcacatcttcgcgtttc

SEQ ID NO: 31958 - DNA, 260 bp, Unknown
  Description of Unknown: RightRegion for integrase B5959 sequence
gtcattaaagaaataaggattgacaatgaccagaatatcacgggtgttgtttttgggtagtgttgtactaacttaacactacccgtcggctcatcagcgaatataactgacggatgtgtaatcagtgcccttgcgattgcaactctctgctgttcaccacctgacatctgtgcaggaaatttatccttacagtaatctatgccaagtgattccattaattcagtgactttctcctcatcagcttgctcactgtcaagaat

SEQ ID NO: 31959 - DNA, 109 bp, Unknown
  Description of Unknown: RightRegion for integrase B5960 sequence
tgtgtgcccttaaatagcgtgattgagggggttcgcctacgttcacgcggagtggactagacgggagtcgaacccgtgtccaaaaaccaatcccctgtccttctacgag

SEQ ID NO: 31960 - DNA, 260 bp, Unknown
  Description of Unknown: RightRegion for integrase B5961 sequence
atggaatatgataaggagaaggatgagtatagtttttattataagtttgaagcggaatagtttttctacaaacatagtgaatactatacaatacacaagtttcaaaatcaacgtatttccattgtttgtggcttttataactctcagctatgcggtggacccgatggagaattaggcgctgccatgcgttacctttcccagcgctattccaacacaaaccgaaaagtagccggtgtgcttacggatatcggtaccgagga

SEQ ID NO: 31961 - DNA, 260 bp, Unknown
  Description of Unknown: RightRegion for integrase B5962 sequence
gtatcagataattcgttcgcctgctgcaaggaatggggagccaaactttcgttaaagtgaccatattgaataggaatgagaacaacatttgcaaagctctattctacgtcatttaagcctgttttataaggcttgtgacaattcaatggtcgctttaattttttgcccgaaaatagtaaatacagggtgttttaaactcccgtagcttatgaactataaaaagttcgtaagctgcgggagttttttgttttatcgctcca

SEQ ID NO: 31962 - DNA, 260 bp, Unknown
  Description of Unknown: RightRegion for integrase B5963 sequence
gtatttgaccgtgctaccggttccgtgaatatcttcttttatctcgcaaactgcccataaacagcaggctttttaaagttggtactcaaatgacaaaaggtcatccagttcgggcaagagaccctgtcaccgtcacaatactgcgttaagatcggctgtcttacatttggtctcgatagatagttcacaaacatctcatcgacaatccttgaaatattagaaaaaatattccgtccaaatacccatttatggtcaaatgc

SEQ ID NO: 31963 - DNA, 260 bp, Unknown
  Description of Unknown: RightRegion for integrase B5964 sequence
tatatggaatatgataaggagaaggatgagtatagtttttattataagtttgaagaataaaaaaacgaaaattaaggagtgccatattgctatggacactccttataaaagcgatctgcttttcaatgatactaatagtatatgcatttttttataatttgtcaacaactttttttatgaatttgtactgcgttttaattacattatttttttcaaagtatgtcttgtttttcagcatcctaacattcaccaactcattt

SEQ ID NO: 31964 - DNA, 260 bp, Unknown
  Description of Unknown: RightRegion for integrase B5965 sequence
gataaagaaacgcaggaaatgactgtggttttgaatggaaatattttgacagccaagtaaaaatcccccgaaagttttatacactttcgggggattttttactattcttttagacggtatatcactattaaatatatattctgtaataattaatgctgcccaaacttaagaagtccctcatttgcagttattatttttaaatcagtaccataattcagaaaatcactgtcatgcgtaattaaataagcattttccctttt

SEQ ID NO: 31965 - DNA, 260 bp, Unknown
  Description of Unknown: RightRegion for integrase B5966 sequence
tatatggaatatgataaggagaaggatgagtatagtttttattataagtttgaagaataaaaaacgaaaattaaggagtgccatattgctatggacactccttataaaagcgatctgcttttcaatgatactaatagtatatgcatttttttataatttgtcaacaactttttttatgaatttgtactgcgttttaattacattatttttttcaaagtatgtcttgtttttcagcatcctaacattcaccaactcattta

SEQ ID NO: 31966 - DNA, 260 bp, Unknown
  Description of Unknown: RightRegion for integrase B5967 sequence
aaaggcgttcaaccaaaagggtttaccctcgaggtttttttacattgcctgtacttatagcttgcacaatgctttgaataacgagatgcaagctatagagtaggttaaaacgccacaataaccctgtacctctcatcaagcacttcgccggtattgccccgctcatcaagctgccaagcggtacgcgcagaaaacaagaacacatgcacgtggtcggtatgtacggcgacggcatagaccgccacggtcgaaagcgttgt

SEQ ID NO: 31967 - DNA, 260 bp, Unknown
  Description of Unknown: RightRegion for integrase B5968 sequence
agaatcgatgataataagaattctaaaatggatattcgtatttatattatttttaaataattatatgtattatattgtatttgtatgtatataatcttgaacattgcttctgctacaccgcgacaacattcaacaacaatttttcctttttcgccgatatgagcaagagctacaccgaagaaacagctaaagaagatgatttgtaacatatcgcttttagcgcaagcttcaacaatgttagcaggaatgatatttaataa

SEQ ID NO: 31968 - DNA, 260 bp, Unknown
  Description of Unknown: RightRegion for integrase B5969 sequence
tatatggaatatgataaggagaaggatgaatatagtttttattataagtttgaagaataaaaaaacgaaaattaaggagtgccatattgctatggacactccttataaaagccatctgcttttcaatgatactaatagtatatgcatttttttataatttgtcaacaactttttttatgaatttgtactgtgttttaattacattatttttttcaaagtatgtcttgtttttcagcatcctaacattcaccaactcattt

SEQ ID NO: 31969 - DNA, 165 bp, Unknown
  Description of Unknown: RightRegion for integrase B5970 sequence
gatatggaatggtacacccaaagtgtagagccaactacccgcagcttgagctcaaaataagttacaacccattggtctgaaacgaaaaactatcgttctgacctgatggttttgcaaggcttccaagatcgtaaaaacggcacttttcggcactttttcccttgt

SEQ ID NO: 31970 - DNA, 260 bp, Unknown
  Description of Unknown: RightRegion for integrase B5971 sequence
gataaagaaacacaggaaatgactgtggttttgaatcaagatattgtaacctgtatttagtaaacataatgcctatggaagtcaaatacactttcatgggcattcttgtttcaatatagaaattctatttttgttgtaaactatttgcagatataatataatagtcataatttaataatgaatttaatcagggagccgaagggtgctacgacagttgccggacttacaaaggaagggagctgatgccaatggttacatac

SEQ ID NO: 31971 - DNA, 260 bp, Unknown
  Description of Unknown: RightRegion for integrase B5972 sequence
tatatggaatatgataaggagaaggatgaatatagtttttattataagtttgaagaataaaaaaacgaaaattaaggagtgccatattgctatggacactccttataaaagcgatctgcttttcaatgatactaatagtatatgcatttttttataatttgtcaacaactttttttatgaatttgtactgcgttttaattacattatttttttcaaagtatgtcttgtttttcagcatcctaacattcaccaactcattt

SEQ ID NO: 31972 - DNA, 260 bp, Unknown
  Description of Unknown: RightRegion for integrase B5973 sequence
aaaggcgcaaaacccgcagattttaccctggatgtttatttgttgcctatatacctctaaagcgacagtactatgaatgctactaacgctttagaggacatttctctaacaaaaaagccccggatctcaccagagaaaccggggcctcagtcgagcaaaatttttgctgatctattgcttttgtgttcaccgcatgatacactgtacttgaaaattgagaatcattttgataactcggcatatactacaagaaatggagg

SEQ ID NO: 31973 - DNA, 260 bp, Unknown; identical to SEQ ID NO: 31963
  Description of Unknown: RightRegion for integrase B5974 sequence

SEQ ID NO: 31974 - DNA, 260 bp, Unknown
  Description of Unknown: RightRegion for integrase B5975 sequence
aaaggcgttcaaccaaaagggtttaccctcgaggtttttttacattgcctgtacttatagcttgcgcaatgttatgataaagactgcttagaggatttacgtgtgctgtttcccgcctcggtgcagcccattgtggacgcttccgctaatgtgcgggtacgggacgttgatgtaatctctgtgtacattgatatgcagccgatcccctttaaccgcgggtattattccattgatctcacgtttttctttgacgtatcttt

SEQ ID NO: 31975 - DNA, 101 bp, Unknown
  Description of Unknown: RightRegion for integrase B5976 sequence
atcttacagaatcctgtaagaatagagagttcgtatctaaatcaaatggtgacccggtagggattcgaaccctagacctactgattcgtagtcagtcactc

SEQ ID NO: 31976 - DNA, 260 bp, Unknown; identical to SEQ ID NO: 31963
  Description of Unknown: RightRegion for integrase B5977 sequence

SEQ ID NO: 31977 - DNA, 260 bp, Unknown
  Description of Unknown: RightRegion for integrase B5978 sequence
aaaggcgttcaaccaaaagggttcaccctcgaggtttttttacattgcctgtacttatagcttgcgcaatgttatgataaagactgcttagaggatttacgtgtgctgtttcccgcctcggtgcagcccgttgtggacgcttccgctaatgtgcgggtgcgggacgttgatgtaatctctgtgtacattgatatgcagccgatcccctttaaccgcgggtattattccattgatctcacgtttttctttgacgtatcttt

SEQ ID NO: 31978 - DNA, 70 bp, Unknown
  Description of Unknown: RightRegion for integrase B5979 sequence
acgtaccgcctaaacaaaggcggcacgttgtcggatttcacttccaatgcaccagcataggtatccaatg

SEQ ID NO: 31979 - DNA, 260 bp, Unknown; identical to SEQ ID NO: 31965
  Description of Unknown: RightRegion for integrase B5980 sequence

SEQ ID NO: 31980 - DNA, 260 bp, Unknown
  Description of Unknown: RightRegion for integrase B5981 sequence
tatatggaatatgataaggagaaggatgagtatagtttttattataagtttgaagaataaaaaaacgaaaattaaggagtgccatattgctatggacactccttataaaagccatctgcttttcaatgatactaatagtatatgcatttttttataatttgtcaacaactttttttatgaatttgtactgcgttttaattacattatttttttcaaagtatgtcttgtttttcagcatcctaacattcaccaactcattt

SEQ ID NO: 31981 - DNA, 260 bp, Unknown
  Description of Unknown: RightRegion for integrase B5982 sequence
cagctcatccgtgtcatctatgcgaccagcgattccatcaagatcgaatggcgcatttaaaggcttgttatttccatcttgtacgcttcggtgaaggcctgcgcctcgccaaggaccgcctggacgagaaaaacgtctactacgtaaacccaagttttgatcagtaaaatagaaaaaggaagtctctgccggttggcagagacttcctttttatggagggatacggcaatgagaatccgggagcgtttcaacccacgcgc

SEQ ID NO: 31982 - DNA, 260 bp, Unknown
  Description of Unknown: RightRegion for integrase B5983 sequence
tatatggaatatgataaggagaagaatgaatatagtttttattataagtttgaagaataaaaaaacgaaaattaaggagtgccatattgctatggacactccttataaaagcgatctgcttttcaatgatactaatagtatatgcatttttttataatttgtcaacaactttttttatgaatttgtactgcgttttaattacattatttttttcaaagtatgtcttgtttttcagcatcctaacattcaccaactcattt

SEQ ID NO: 31983 - DNA, 260 bp, Unknown
  Description of Unknown: RightRegion for integrase B5984 sequence
aaaagcgttcaaccaaaagggttcaccctcgaggtttttttacattgcctgtacttatagcttgcgcaatgttatgataaagactgcttagaggatttacgtgtgctgtttcccacctcggtgcagcccattgtggacgcttccgctaatgtgcgggtgcgggacgttgatgtaatctctgtgtacattgatatgcagccgattccctttaaccgcgggtattactccattgatctcacgtttttctttgacgtatcttt

SEQ ID NO: 31984 - DNA, 260 bp, Unknown
  Description of Unknown: RightRegion for integrase B5985 sequence
aaaggcgttcaaccaaaagggttcaccctcgaggtttttttacattgcctgtacttatagcttgcgcaatgctttgataaagactgcttagaggatttacgtgtgctgtttcccgcctcggtgcagcccgttgtggacgcttccgctaatgtgcgggtgcgggacgttgatgtaatctctgtgtacattgatatgcagccgatcccctttaaccgcgggtattattccattgatctcacgtttttctttgacgtatcttt

SEQ ID NO: 31985 - DNA, 260 bp, Unknown
  Description of Unknown: RightRegion for integrase B5986 sequence
aaaggcgttcaaccaaaagggtttaccctcgaggtttttttacattgcctgtacttatagcttgcgcaatgctttgaataacgagatgcaagctatagggtaggttaaaacgccacaacaaccctatacctctcatcaagcacttcgccggtattgccccgcgcgtcaagctgccacacggtctgcacggagaacaagaacacatgcacgtggtcggtatgtacggcgacggcatagaccgccacggtcgaaaatgttgt

SEQ ID NO: 31986 - DNA, 260 bp, Unknown; identical to SEQ ID NO: 31963
  Description of Unknown: RightRegion for integrase B5987 sequence

SEQ ID NO: 31987 - DNA, 260 bp, Unknown; identical to SEQ ID NO: 31968
  Description of Unknown: RightRegion for integrase B5988 sequence

SEQ ID NO: 31988 - DNA, 109 bp, Unknown
  Description of Unknown: RightRegion for integrase B5989 sequence
acctaccgcctgtcgaaagacggtaggttatcggattacgcttccaatactccattataggcttcaagcactttacttgcagataccttactcttcacttcatttcttc

SEQ ID NO: 31989 - DNA, 260 bp, Unknown
  Description of Unknown: RightRegion for integrase B5990 sequence
gataaagaaacacaggaaatgactgtagttttgaacgaggatattttagcagctaagtaaaaatcccccgaaagtttgatacactttcgggggattttttactattctttcagacggtatatcactattaaatatatattctgtataattaatgctgcccaaacttaagaagtccctcatttgcagttattatttttaaatcagtaccataattcagaaaatcactgtcatgcgtaattaaataagcattttcccttttt

SEQ ID NO: 31990 - DNA, 260 bp, Unknown
  Description of Unknown: RightRegion for integrase B5991 sequence
aaaggcgttcaaccaaaagggtttaccctcgaggtttttttacattgcctgtacttatagcttgcgcaatgctttgataaagactgcttagaggatttacgtgtgctgtttcccgcctcggtgcagcccgttgtggacgcttccgctaatgtgcgggtgcgggacgttgatgtaatctctgtgtacattgatatgcagccgatcccctttaaccgcgggtattattccattgatctcacgtttttctttgacgtatcttt

SEQ ID NO: 31991 - DNA, 260 bp, Unknown
  Description of Unknown: RightRegion for integrase B5992 sequence
gccccagagggcaatggttcggatttaggttgcttcgctccaccaaagaaaaacacctaggaacgcaagttcttgggtgttttctttttgctgtaacccactatgaaacccactttttaacctcaaagaaacaatggcggagaaatgagatattcaaaagaaagactccagcgtgtcgacgatatgatctttgaaataatgaagagcgttgaggtgcgcccagatagggcattgtgtagtgtagcgtaagggactacccc

SEQ ID NO: 31992 - DNA, 260 bp, Unknown
  Description of Unknown: RightRegion for integrase B5993 sequence
aaaggcgttcaaccaaaagggtttaccctcgaggtttttttacattgcctgtacttatagcttgcacaatgctttgataaagactgcttagaggatttacgtgtgctgtttcccgcctcggtgcagcccgttgtggacgcttccgctaatgtgcgggtgcgggacgttgatgtaatctctgtgtacattgatatgcagccgatcccctttaaccgcgggtattattccattgatctcacgtttttctttgacgtatcttt

SEQ ID NO: 31993 - DNA, 260 bp, Unknown
  Description of Unknown: RightRegion for integrase B5994 sequence
gaattaattcagaaaatcgacttgtctgacgacaaaattaatattgtatggaagtattaattttatcttgttttatcctcgttgtatttttataactaatgttgacagtttagactggaaaaatctatctgcggcagacatcaccgcccgcgttaccaaccgggtgaaacccgggtctgttatgctgttccacaacggcgccaaaaacacgccggaggctttgccgcaggtgattgaaaagcttcaggccgatgggttta

SEQ ID NO: 31994 - DNA, 260 bp, Unknown
  Description of Unknown: RightRegion for integrase B5995 sequence
acgtaccgcctaaacaaaggcggcacgttgtcggatttcgcttccaatgcaccaagttagaacgctgaaagagctggatgaaagccaaccgtgggcagttttcatgaagaggattaaccgaaaaactttggtggtctgtgaaagttgtcacacgaaaattcacggtgcaggctgtgaatgaatagagagccggatacagcgagagttgtaagtccggttcgggggcgagtgcctggaaacctaccgcagcaatgcggcaa

SEQ ID NO: 31995 - DNA, 260 bp, Unknown
  Description of Unknown: RightRegion for integrase B5996 sequence
tcatatacaaacgggagggcaggaaacgtaaatggaaaactctgcaagcgtaaagcctaaaatcaggctgataccagcgaaacaaaggcaggaactggtcggcagggcaacgccgaacggggaattggcaaaactgcgtattgctccatatgcaagagtgtcgacagaccatgaagaacaggagagtagttacgaggcgcaggtaaagcactttaaacaactgattgaaagtcatactgattgggagttggtggatatct

SEQ ID NO: 31996 - DNA, 260 bp, Unknown; identical to SEQ ID NO: 31963
  Description of Unknown: RightRegion for integrase B5997 sequence

SEQ ID NO: 31997 - DNA, 260 bp, Unknown; identical to SEQ ID NO: 31974
  Description of Unknown: RightRegion for integrase B5998 sequence

SEQ ID NO: 31998 - DNA, 260 bp, Unknown
  Description of Unknown: RightRegion for integrase B5999 sequence
aaaggcgttcaaccaaaagggtttaccctcgaggtttttttacattgcctgtacttatagcttgcgcaatgttatgaataacgagatgcaagctatagagtaggttaaaacgccacaataaccctatacctctcatcaagcacttcgccggtattgccccgctcatcaagctgccaagcggtatgcgcagagaacaagaacacatgcacgtggtcggtatgtacggcgacggcatagaccgccacggtcgaaaatgttgt

SEQ ID NO: 31999 - DNA, 109 bp, Unknown
  Description of Unknown: RightRegion for integrase B6000 sequence
gccccagagggcaatggttcggatttgggttgcttcgctccaccaaaaggaccagcgtagaaattacgctggttttttgttttgcccggcatcttaagtctcactctcg

SEQ ID NO: 32000 - DNA, 260 bp, Unknown
  Description of Unknown: RightRegion for integrase B6001 sequence
cagctcatccgtgtcatctatgcgaccagcgattccatcaagatcgaatggcgcatttgaaggcttgttatttccatcttgtacgcttcggtgaaggcctgcgcctcgccaaggaccgcctggacgagaaaaacgtctactacgtaaacccaagctttgatcagtaaaatagaaaaatgaaaggaagtctctgccggttggcagagacttcctttttatggagggatacggcaatgagaatccgggagcgtttcaaccca

SEQ ID NO: 32001 - DNA, 260 bp, Unknown
  Description of Unknown: RightRegion for integrase B6002 sequence
aaccgtcaaaatgatactttaaaaatctactactttttatataaatctaattgtggataactttttaaaatcaccactttttaacactataattttatgatacaatttgttgcaaagcctttaaatataaggctttgctgtactttatatgttcttgagaaaaggttgacgcagtggggttcgaaggctctgggcgatcagggttattctgccattgaaatcctacgctactattatggggacgatatgtacatcaatac

SEQ ID NO: 32002 - DNA, 260 bp, Unknown
  Description of Unknown: RightRegion for integrase B6003 sequence
gttggtaaagatggcgaaaaaagttacagttatacctgcaaaacaggtcagagcaaatagtacaaaagcaatatcggctgtaagaaaaacaagagttgcggcatattgccgtgtatcgaccgatgctgaagagcagcttaattcttttgacaatcaggtagagtattacaccaggtatatcaatgagaatccggcatatgagatggttggtatttatgcggatgaaggtatctccggaaccaataccaagaagcgtaagg

SEQ ID NO: 32003 - DNA, 260 bp, Unknown
  Description of Unknown: RightRegion for integrase B6004 sequence
aaaggcgttcaaccaaaagggtttaccctcgaggtttttttacattgcctgtacttatagcttgcacaatgttatgataaagactgcttagaggatttacgtgtgctgtttcccgcctcggtgcagcctgttgtggacgcttccgctaatgtgcgggtgcgggacgttgatgtaatctctgtgtacattgatatgcagccgatcccctttaaccgcgggtattactccattgatctcacgtttttctttgacgtatcttt

SEQ ID NO: 32004 - DNA, 260 bp, Unknown
  Description of Unknown: RightRegion for integrase B6005 sequence
aaaggcgttcaaccaaaagggtttaccctcgaggtttttttacattgcctgtacttatagcttgcgcaatgctttgataaagactgcttagaggatttacgtgtgctgtttcccgcctcggtgcagcccgttgtggacgcttccgctaatgtgcgggtgcgagacgttgatgtaatctctgtgtacattgatatgcagccaatcccctttaaccgcgggtattattccattgatctcacgtttttctttgacgtatcttt

SEQ ID NO: 32005 - DNA, 76 bp, Unknown
  Description of Unknown: RightRegion for integrase B6006 sequence
aaaggcgcaaaacccgcagattttaccctggatgtttatttgttgcctatatacctctaaagcgacagtactatga

SEQ ID NO: 32006 - DNA, 260 bp, Unknown
  Description of Unknown: RightRegion for integrase B6007 sequence
aaaggcgcaaaacctaaggatttcgcgcttgaggtctatctgagaaaggtctatttatagcttgcaccgtgcagcgataaagactgcttagaggatttacgtgtgctgtttcccgcctcggtgcagcccgttgtggacgcttccgctaatgtgcgggtgcgggacgttgatgtaatctctgtgtacattgatatgcagccgatcccctttaaccgcgggtattattccattgatctcacgtttttctttgacgtatcttt

SEQ ID NO: 32007 - DNA, 260 bp, Unknown
  Description of Unknown: RightRegion for integrase B6008 sequence
tatatggaatatgataaggagaaggatgaatatagtttttattataagtttgaagaataaaaaaactaaggccgggtgcgacataatcgtcgccccagccattacaaaacatgacaaatacctttcatatcaggtatactgacaatcaagatttctatgttctaatgttctatcatcttcttttctcattagataaacagtaatcttgattacaaaaaaataataacctaattgatttaatgagccaatccgctttatct

SEQ ID NO: 32008 - DNA, 260 bp, Unknown; identical to SEQ ID NO: 31964
  Description of Unknown: RightRegion for integrase B6009 sequence

SEQ ID NO: 32009 - DNA, 260 bp, Unknown
  Description of Unknown: RightRegion for integrase B6010 sequence
aacatcaaagattggaagttaaaacaaaaacaacggagggaggaacagaatggacagtaatcagagaatcgtgcggacaatccccgcatcgtttacgaggacaacctcgcaagtcgttcggctgctaaatgtaggtgcatatgctcgagtaagtacaaaaaaggaagaacaggaggacagttacgaacggcagggttcgcattatacgaaatatatcaaatcccatgatggttggcaatttgtggacgtatatgcggatg

SEQ ID NO: 32010 - DNA, 260 bp, Unknown
  Description of Unknown: RightRegion for integrase B6011 sequence
atagataaaatagagctgaatgcagatggaagcattgctatctactggaaatttgcgtaattttttttacgcaaattttctacaactaataatacatgggttcatccaactgttattagttgtagaaagacacagtgcatatataatatgaagaaactaaataaaataaggcagcccggaaagatataccggagctgcctttgtgtattatttcaaggtgtataagatgcatttcccccttaaaccccctctgcgccaca

SEQ ID NO: 32011 - DNA, 109 bp, Unknown
  Description of Unknown: RightRegion for integrase B6012 sequence
acgtaccgcctaaacaaaggcggcacgttgtcggatttcacttccaatgcacctccttagtcagcttcctttcttctgaaaccatcgtctgggcctgtatccgcagcgg

SEQ ID NO: 32012 - DNA, 260 bp, Unknown; identical to SEQ ID NO: 31964
  Description of Unknown: RightRegion for integrase B6013 sequence

SEQ ID NO: 32013 - DNA, 260 bp, Unknown
  Description of Unknown: RightRegion for integrase B6014 sequence
gtatttgaccgtgctaccggttccgtgaatatcttcttttatctcgcaaactgcccataaacagcaggctttttaaagttggtactcaaatgacaaaaggtcatccttttatcatttgagtaccaacaaataattttcgatcaatctttattatttatagcttcacaactatgttatttatcatatcatagtttattcattaaaaaaagccggaatttcttccggctttcaaaagttcatgcgtatttactaatacccaa

SEQ ID NO: 32014 - DNA, 260 bp, Unknown
  Description of Unknown: RightRegion for integrase B6015 sequence
tatatggaatatgataaggaaaaggatgagtatagtttttattataagtttgaagaataaaaaggccagaaaagaaaatttcttttctggccaacaatgtatacgttacttaaaaaatggtatcctctcctgtgttcattttgaaccctcctttattcttctcgtttatactaataatattcccaattatacaatttgtcaactcttaaaatcagttacggtagtccccttaatggtattttttgtattatttttatata

SEQ ID NO: 32015 - DNA, 260 bp, Unknown
  Description of Unknown: RightRegion for integrase B6016 sequence
ttcgaccgaatgaacgccagctccaccatacgttcgccagtcgaactgtatccactgtgagtattattccggtggatttgcggttttgatttggctttagacaaaacggatgggtgcagctgctgcattcatccgtttttttgtttgtttgcttgctacaataatatcgccacaaccgcaggcattcgcttgctgaacctacatacgaacgacagttctttcgagaacccgaatcggagggcaccgtcctctgttgggct

SEQ ID NO: 32016 - DNA, 260 bp, Unknown
  Description of Unknown: RightRegion for integrase B6017 sequence
tatatggaatatgataaggagaacgatgagtatagtttttattataagtttgaagaataaaaaaacgaaaattaaggagtgccatattgctatggacactccttataaaagcgatctgcttttcaatgatactaatagtatatgcatttttttataatttgtcaacaactttttttatgaatttgtactgcgttttaattacattatttttttcaaagtatgtcttgtttttcagcatcctaacattcaccaactcattt

SEQ ID NO: 32017 - DNA, 260 bp, Unknown
  Description of Unknown: RightRegion for integrase B6018 sequence
tatatggaatatgataaggagaaggatgagtatagtttttattataagtttgaagaataaaacaaggctgaaacttcattgtttcagccttttaaaattttaatgccttaatataaatttacaacttttacctgtttcaaaatcagcaattttcaaatcgtttttcctatactctctcttaatacactttgatgtgtttgaaaacggatgtgtcccttgcaaagtaaacacaaacctagtattctcttccataggatact

SEQ ID NO: 32018 - DNA, 260 bp, Unknown
  Description of Unknown: RightRegion for integrase B6019 sequence
aatacggcggggtggttagaccgccgattggatagattaagtaaggagggcaaacaatgagcatacctcaaaggatagtgcaagaaagaccagtcatatacagaccgacaaatacggcaagcggcattcacaaggagaacgtaacctactatgctcgtgtaagtacccaaaacgatgaacaggaagactcatacgaaagacaaaaggctcacttcgaagagaagatccactcaaacccgaattggaactatgtcgaagga

SEQ ID NO: 32019 - DNA, 109 bp, Unknown
  Description of Unknown: RightRegion for integrase B6020 sequence
gtttttaacaaaaaatcagaaaatatcgacgtttacttctatacgctcaaacccttgtaaatactgggtttgagcgtggtgagtacgcaaacgcaaaaaggtcatccac

SEQ ID NO: 32020 - DNA, 109 bp, Unknown
  Description of Unknown: RightRegion for integrase B6021 sequence
gtgtttaataaaaaagagtccactattgatgtttacttttatacctccaaccccttgtaaatactggggttggagagagtttatacgcaaacgcaatctggtcatccag

SEQ ID NO: 32021 - DNA, 260 bp, Unknown
  Description of Unknown: RightRegion for integrase B6022 sequence
accaattctcttatggtggaggtgcggagaatcgaactccggtccacgaaagccccctgatcggcatctccaagctcagtcgctgatttaatcttggacgcgttgcgcgcagcgacacgctcgcagcatcccaaccggttcggtcttagcccgcgccataccggttacgtgcgcgggagcattcccctaaaatgacgtcgcaccggtgtcggggaaatcaccgggttgacgcgccagctataaattaagcagcgagagcc

SEQ ID NO: 32022 - DNA, 260 bp, Unknown
  Description of Unknown: RightRegion for integrase B6023 sequence
actaattctcttatggtggagccgcggagaatcgaactccggtccacgacagctccctgatcggcatctccaggctcagtcactcatttagtctcggacacattgcgcggagcgacacgctctcagtgccccaatcggttcggtcttagcccgcgccataccgattacgtgcgcgggagcattcccctcaaatgacgtcgcgccggtgtcggggaaatcaccgggttgacgcgccgctataaattaagcagcgagagcca

SEQ ID NO: 32023 - DNA, 260 bp, Unknown
  Description of Unknown: RightRegion for integrase B6024 sequence
aatacggcggggtggttagaccgccgattggatagattaagtaaggagggcaaacaatgagcatacctcaaaggatagtgcaagaaagaccagtcatatacagaccgacaaacacggcaagcggcattcacaaggagaacgtaacctactatgctcgtgtaagtacccaaaacgatgaacaggaagactcatacgaaagacaaaaggctcacttcgaagagaagatccactcgaatccgaattggaactatgtcgaagga

SEQ ID NO: 32024 - DNA, 260 bp, Unknown
  Description of Unknown: RightRegion for integrase B6025 sequence
gtgtttaataaaaaagaggccactattgatgtttacttttatacctccaaccccttgtaaatactggggttggagagagtttatacgcaaacgcaatctggtcatccagctcggacaggagaccttctgtccgtcacagtactgcgtcagaatcggctgcttcacattaggtctcgacagatagttttcaaacatttcatttactatcagcgagatattgtcatatatatttctgccatagatgaatttgtggtcatatg

SEQ ID NO: 32025 - DNA, 260 bp, Unknown
  Description of Unknown: RightRegion for integrase B6026 sequence
gtatttaataaaaaagaggccactattgatgtttacttttatacctcaaaccccttgtaaatactggggtttgagagagtttatacgcaaacgcaatctggtcatccagctcggacaggagaccttctgtccgtcacagtactgcgtcagaatcggctgcttcacattaggtctcgacagatagttttcaaacatttcatttactatcagcgagatattgtcatatatatttctgccatagatgaatttgtggtcatatg

SEQ ID NO: 32026 - DNA, 109 bp, Unknown; identical to SEQ ID NO: 32019
  Description of Unknown: RightRegion for integrase B6027 sequence

SEQ ID NO: 32027 - DNA, 109 bp, Unknown; identical to SEQ ID NO: 32020
  Description of Unknown: RightRegion for integrase B6028 sequence

SEQ ID NO: 32028 - DNA, 260 bp, Unknown
  Description of Unknown: RightRegion for integrase B6029 sequence
gtgtttaataaaaaagagtccactattgatgtttacttttatacctccaaccccttgtaaatactggggttggagagagtttatacgcaaacgcaatctggtcatccagctcggacaggaaaccttctgtccgtcacagtactgcgtcagaatcggctgcttcacattaggtctcgacagatagttttcaaacatttcatttactatcagcgagatattatcatatatatttctgccatagatgaatttgtggtcatatg

SEQ ID NO: 32029 - DNA, 260 bp, Unknown
  Description of Unknown: RightRegion for integrase B6030 sequence
aaaacgtaccgcctaaacaaaggcggcacgttgtcggatttcgcttccaatgcaccctgacggcgcaggcgaaaacacggaactgaccgtagcggacgcagtgcgtgcactgctgctgtggacgggcatgaccgagcagcagctcggctcgttcccggatgactatctggctcaggcccgcagcatgggcatgatcgacacggacaccgacgccgacgcgccctgcacgctcgcggcttaccgccagatgaaggcggtcg

SEQ ID NO: 32030 - DNA, 109 bp, Unknown; identical to SEQ ID NO: 32020
  Description of Unknown: RightRegion for integrase B6031 sequence

SEQ ID NO: 32031 - DNA, 204 bp, Unknown
  Description of Unknown: RightRegion for integrase B6032 sequence
gtgtttaataaaaaagaggccactattgatgtttacttttatacctccaaccccttgtaaatactggggttggagagagtttatacgcaaacgcaatctggtcatccagctcggacaggaaaccttctgtccgtcacagtactgcgtcagaatcggctgcttcacattaggtctcgacagatagttttcaaacatttcatttac

SEQ ID NO: 32032 - DNA, 109 bp, Unknown
  Description of Unknown: RightRegion for integrase B6033 sequence
gtgtttaataaaaaagaggccactattgatgtttacttttatacctccaaccccttgtaaatactggggttggagagagtttatacgcaaacgcaatctggtcatccag

SEQ ID NO: 32033 - DNA, 159 bp, Unknown
  Description of Unknown: RightRegion for integrase B6034 sequence
aaaacgtaccgcctaaacaaaggcggcacgttgtcggatttcgcttccaatgcaccatgaatgaaaaggagctagttgtcatggaggccacagccgaagggctcaagaaagccagagaaacggaggttccagaataagggcctctgtttttttgcgcca

SEQ ID NO: 32034 - DNA, 109 bp, Unknown; identical to SEQ ID NO: 32020
  Description of Unknown: RightRegion for integrase B6035 sequence

SEQ ID NO: 32035 - DNA, 109 bp, Unknown
  Description of Unknown: RightRegion for integrase B6036 sequence
gtgtttaataaaaaagaggccactattgatgtttacttttatacctcaaaccccttgtaaatactggggttggagagagtttatacgcaaacgcaatctggtcatccag

SEQ ID NO: 32036 - DNA, 260 bp, Unknown
  Description of Unknown: RightRegion for integrase B6037 sequence
gtgtttaataaaaaagagtccactattgatgtttacttttatacctccaaccccttgtaaatactggggttggagagagtttatacgcaaacgcaatctggtcatccagctcggacaggaaaccttctgtccgtcacaatactgcgtcagaatcggctgcttcacattaggtctcgacagatagttttcaaacatttcatttactatcagcgagatattgtcatatatatttctgccatagatgaatttgtggtcatatg

SEQ ID NO: 32037 - DNA, 260 bp, Unknown
  Description of Unknown: RightRegion for integrase B6038 sequence
tgcgggagccagcaacatgcgctatgtacaattatatatttcatcaaagaaatggcataaaaaaccgtagcctcgttaccatccagatagtgggggtctactgctttggtgaccttatctaggcaaaaaaaataacggcggtaacatgatagttaccgccgcttttgctaaattttctttacataatccaggcaaatccacccggctttcgacttcaggaatccccatttgttgcaagtatcgataatggtatagacacc

SEQ ID NO: 32038 - DNA, 178 bp, Unknown
  Description of Unknown: RightRegion for integrase B6039 sequence
cgccgcgacttcaactacggtcataagtacatcgtggatttcaaaatcaaattcaagtaacaaaataagcccggaggaaatatcctccgggctttcttacggtgcgagaagtcctttgtatcgccagcctatgtccagcggttgtcgatagaacggacttctcatatgcggttgttcc

SEQ ID NO: 32039 - DNA, 260 bp, Unknown
  Description of Unknown: RightRegion for integrase B6040 sequence
gtgtttaataaaaaagagtccactattgatgtttacttttatacctccaaccccttgtaaatactggggttggagagagtttatacgcaaacgcaatctggtcatccagctcggacaggagaccttctgtccatcacagtactgcgtcagaatcggctgcttcacattaggtcttgacaaatagttttcaaacatttcatttactatcagcgagatattgtcatatatatttctgccatagatgaatttgtggtcatatg

SEQ ID NO: 32040 - DNA, 260 bp, Unknown
  Description of Unknown: RightRegion for integrase B6041 sequence
gtttttaacaaaaaattacaaaatatcgacgtttacttctatacgctcaaacccttgtaaatactgggtttgagcatggtgagtacgcaaacgcaaaaaggtcaaccaccttgagaaactgccagttcaagtgctgttgattttcccatggatgtatcacctgctaaactataaattggattagcaattgccattccccatctgctattaataaatcccaaaacagtagcagatacccccatagctgaggctaattgcaa

SEQ ID NO: 32041 - DNA, 154 bp, Unknown
  Description of Unknown: RightRegion for integrase B6042 sequence
gtgtttaataaaaaagagtccactattgatgtttacttttatacctccaaccccttgtaaatactggggttggagagagtttatacgcaaacgcaatctggtcatccagctcggacaggagaccttctgtccgtcacagtactgcgtcagaatc

SEQ ID NO: 32042 - DNA, 260 bp, Unknown; identical to SEQ ID NO: 32024
  Description of Unknown: RightRegion for integrase B6043 sequence

SEQ ID NO: 32043 - DNA, 260 bp, Unknown
  Description of Unknown: RightRegion for integrase B6044 sequence
aaggaaagccagtttcctgttaaagtggatatttatctccggtccgatctctttgaataataaacacctgccaaagtcccctcaaggggactttttctttttctgaaatcttctttacttccacaatatggtatgaagttatcagattctgcctgtttttaacaaaaacgggacaaaaaccagaatcaaatagtatattttagaaaaaggagtcgatcaaaatgatcaaaagtttgttgtcaaggaaactgggagaattg

SEQ ID NO: 32044 - DNA, 109 bp, Unknown; identical to SEQ ID NO: 32020
  Description of Unknown: RightRegion for integrase B6045 sequence

SEQ ID NO: 32045 - DNA, 98 bp, Unknown
  Description of Unknown: RightRegion for integrase B6046 sequence
tcgtctgccatcctgcctatccccggcggttctgatgatgcactagtggtgacccagtagggattcgaaccctagacccacagcttagaaggctgttg

SEQ ID NO: 32046 - DNA, 193 bp, Unknown
  Description of Unknown: RightRegion for integrase B6047 sequence
gtgtttaataaaaaagagtccactattgatgtttacttttatacctcaaaccccttgtaaatactggggtttgagagagtttatacgcaaacgcaatctggtcatccagctcggacaggaaaccttctgtccgtcacaatactgcgtcagaatcggctgcttcacattaggtctcgacagatagttttcaaac

SEQ ID NO: 32047 - DNA, 260 bp, Unknown
  Description of Unknown: RightRegion for integrase B6048 sequence
ttaattgataaggtcgttgttctgaatactgatgttacgatctactggtcattctgctaagtacagactacagatggtctctacgttggcactccatgggaacatatcaacacagcaagccctttcaacccggtatccatatccttgcagcatctccaagtctctagccaggcttgtcggtttgcaggagatatataccattttctttaccctataagtcgcagcgatcttcttcagtgcttttggatggatgccatccc

SEQ ID NO: 32048 - DNA, 260 bp, Unknown
  Description of Unknown: RightRegion for integrase B6049 sequence
gtgtttaataaaaaagaggccactattgatgtttacttttatacctccaaccccttgtaaatactggggttggagagagtttatacgcaaacgcaatctggtcatccagctcggacaggaaaccttctgtccgtcacagtactgcgtcagaatcggctgcttcacattaggtctcgacagatagttttcaaacatttcatttactatcagcgagatattatcatatatatttctgccatagatgaatttgtggtcatatg

SEQ ID NO: 32049 - DNA, 260 bp, Unknown
  Description of Unknown: RightRegion for integrase B6050 sequence
  modified_base (41)..(50): a, c, t, g, unknown or other
gacaagcggcgggtggtggatttgatgattaccaccgttgnnnnnnnnnntatcctttgacgacaagcggcgggtggtggatttgatgattaccaccgttgccgctacaagcgacagcttgaacatcacatggaaaatctgatgggtggaacccctcccgtcagatacctaccctgtgtagtcccttgtaaactgtactttctttctgctataatatttaaagaaaaataacaaaaagggagatggaaatatatgatttg

SEQ ID NO: 32050 - DNA, 260 bp, Unknown
  Description of Unknown: RightRegion for integrase B6051 sequence
gtgtttaataaaaaagagtccactattgatgtttacttttatacctccaaccctttgtaaatactggggttggagagagtttatacgcaaacgcaatctggtcatccagctaggacaggagaccttctgtccgtcacagtactgcgtcagaatcggctgcttcacattaggtctcgacagatagttttcaaacatttcatttactatcagcgagatattgtcatatatatttctgccatagatgaatttgtggtcatatg

SEQ ID NO: 32051 - DNA, 100 bp, Unknown
  Description of Unknown: RightRegion for integrase B6052 sequence
atcttacagaatcctgtaaaggtggagagttcgtacctcaatcaaatggtgacccggtagggattcgaaccctagacctactgattcgtagtcagtcact

SEQ ID NO: 32052 - DNA, 260 bp, Unknown
  Description of Unknown: RightRegion for integrase B6053 sequence
agaacgctgagagaggaagacttgcatgctgcggtcctcacagcgattaacgatgcctagtctagaaaagcggatatcataccagctctgaaggagaatatcaaagccgttcttgatggcggagttgcggatgccatcgcagaaatcgacgagaagataaaggagaagcagaaggaactcctcgaagccggacatgatgatgccttgattgatagcattggcgcagagatcatcgacctcagagaagaacatcaggattt

SEQ ID NO: 32053 - DNA, 176 bp, Unknown
  Description of Unknown: RightRegion for integrase B6054 sequence
gtgtttaataaaaaagagtccactattgatgtttacttttatacctccaaccccttgtaaatactggggttggagagagtttatacgcaaacgcaatttggtcatccagctcggacaggagaccttctgtccgtcacagtactgcgtcagaatcggctgcttcacattaggtctcg

SEQ ID NO: 32054 - DNA, 260 bp, Unknown
  Description of Unknown: RightRegion for integrase B6055 sequence
atgtactacgaaaaaggctgtacatccgaagatatacagcttgaaattttactaaaataagtaggtatcatacggcagtctattcataggcatctagatgatacctccttccttttatgtaaatttaaggattcatctttccatactatgcgtattataacataaacggaaatatagataatactcatatgacatttgatgttataactaattaaaagagccgctaaaaatggctctatatccttattttgatgttaggg

SEQ ID NO: 32055 - DNA, 260 bp, Unknown
  Description of Unknown: RightRegion for integrase B6056 sequence
aatacggcggggtggttagaccgccgattggatagattaagtaaggagggcaaacaatgagcatacctcaaaggatagtgcaagagagaccagttatatacagaccgacaaacacggcaagcagcattcacaaggagaacgtaacctactatgctcgtgtaagtacccaaaacgatgaacaggaagactcatacgaaagacaaaaggctcacttcgaagagaagatccactcaaacccgaattggaactatgtcgaagga

SEQ ID NO: 32056 - DNA, 109 bp, Unknown; identical to SEQ ID NO: 32020
  Description of Unknown: RightRegion for integrase B6057 sequence

SEQ ID NO: 32057 - DNA, 260 bp, Unknown
  Description of Unknown: RightRegion for integrase B6058 sequence
aaccaaaaaggttggaaagaaaagattaaaggaggcttaagagcaaaatggaaacgataatcaataatcaacccaaagtggtgagggttgtaaggaaggtatcgtccacgcagataaccgcacaaactatacgggagcagttgacagatacgcgattgcccgttgcggcctatgcaagagtctcaactacaaacgaagagcaggaagacagtcttgaaagacaaagagcgcattacaccgaatatataggaaatcgtccc

SEQ ID NO: 32058 - DNA, 115 bp, Unknown
  Description of Unknown: RightRegion for integrase B6059 sequence
gccattaaagaaattagaattgataatgaccagaatatcacgggtgttgtttttgggtagtgttgtactaatgtgacactacccgtgggttcatctgccagaaggatatggggat

SEQ ID NO: 32059 - DNA, 109 bp, Unknown; identical to SEQ ID NO: 32020
  Description of Unknown: RightRegion for integrase B6060 sequence

SEQ ID NO: 32060 - DNA, 260 bp, Unknown
  Description of Unknown: RightRegion for integrase B6061 sequence
gatgatgtatcagataattcgttcgcctgctgcaaggaatggggagccaatcacgcataatccgaacactttcgtcactaagaatgtgttcggatttgttgtttatttttgatattgaaaccgtccgaatttttataagttcgggcggtttttgttatcataaagtaaaattcgcattaggtttgagtgctgattataaggtcaagatagaatttatgcaaattgttatctttgtataaatcgtgccataagatatactt

SEQ ID NO: 32061 - DNA, 260 bp, Unknown
  Description of Unknown: RightRegion for integrase B6062 sequence
cgccgcgacttcaactacggtcataagtacatcgtggatttcaaaatcaaattcaagtaacaaaaataagcccggaggaaatttcctccgggcttatttgcggtgcgagaagtcctttgcatcgccagcctatgtccaacggctgccgcaggacctcaagcgtcgccttcgagaattccggcagctcgtcgaggaacaagacaccgtgatgcgcgagcgtgacctcgccgggacgcggcacactgccgccgccgatcatc

SEQ ID NO: 32062 - DNA, 109 bp, Unknown; identical to SEQ ID NO: 32032
  Description of Unknown: RightRegion for integrase B6063 sequence

SEQ ID NO: 32063 - DNA, 109 bp, Unknown; identical to SEQ ID NO: 32032
  Description of Unknown: RightRegion for integrase B6064 sequence

SEQ ID NO: 32064 - DNA, 78 bp, Unknown
  Description of Unknown: RightRegion for integrase B6065 sequence
tgtggtagcccgtaccagattcgaactggtgatctccgccttgagagggcggcgtcctaaaccgctagacgaacgggc

SEQ ID NO: 32065 - DNA, 139 bp, Unknown
  Description of Unknown: RightRegion for integrase B6066 sequence
gtcattaaagaaattagaattgataatgaccagaatatcacgggtgttgtttttgggtagtgttgtactaatgtgacactacccgtgggcagtgttaagttagtacaaatataaaaaggctacacactgactgtgtacc

SEQ ID NO: 32066 - DNA, 109 bp, Unknown
  Description of Unknown: RightRegion for integrase B6067 sequence
attgtttacgatcgggaatccgatactctgaaaattcatttctttttataccactcataatgccggaaacccgcgtatttacgggatttccggctactttataggttgt

SEQ ID NO: 32067 - DNA, 109 bp, Unknown
  Description of Unknown: RightRegion for integrase B6068 sequence
aaaattatctacaaccgagaacaagattctctgaaaatctattatttcttatatcagtaaaatacccgcaaacacctgtaaaataagggcttgcgggttctttatacgt

SEQ ID NO: 32068 - DNA, 260 bp, Unknown
  Description of Unknown: RightRegion for integrase B6069 sequence
attgtttacgatcgggaatccgatactctgaaaattcatttctttttataccactcataatgccggaaaccctcgtatttacgggctttccggctactttataggttgtgacaatttggtcatccagttcggacactgaacctgtcttccgtcacagtattgtgtcagaatcggctgccttacattcggtctggaaagataatctgcaaacagttcgtccaccactgtagaaatggagtcaaaaacatttcgttccggaa

SEQ ID NO: 32069 - DNA, 260 bp, Unknown
  Description of Unknown: RightRegion for integrase B6070 sequence
attgtttacgatcgggaatccgatactctgaaaattcatttctttttataccactcataatgccggaaacccacgtatttacgggctttccggctactttataggttgtggcaatttggtcaaccattttgccacaaccgataaagttatttcttcttattttaagggaattgtaagtcctcatgtttggtgctgtcaaccgtgatttatttcacccgcagtctctgaccaacatagatcacattcggattgctgattcc

SEQ ID NO: 32070 - DNA, 109 bp, Unknown
  Description of Unknown: RightRegion for integrase B6071 sequence
aaaattgtctacgaccgagaacaagattctctgaaaatctattatttcttatatcagtaaaatgcccgcaaaccactgtaaaataagggtttgcgggttctttatacgt

SEQ ID NO: 32071 - DNA, 109 bp, Unknown
  Description of Unknown: RightRegion for integrase B6072 sequence
attgtttacgatcgggaatccgatactctgaaaattcatttctttttataccactcataatgccgggaacccacgtatttacgggctttccggctactttataggttgt

SEQ ID NO: 32072 - DNA, 109 bp, Unknown
  Description of Unknown: RightRegion for integrase B6073 sequence
attgtttacgatcgggaatccgatactctgaaaattcatttctttttataccactcataatgccggaaacccacgtatttacaggctttccggctactttataggttgt

SEQ ID NO: 32073 - DNA, 260 bp, Unknown
  Description of Unknown: RightRegion for integrase B6074 sequence
attgtttacgatcgggaatccgatactctgaaaattcatttctttttataccactcataatgccggaaacccacgtatttacaggctttccggctactttataggttgtgacaatttggtcatccagttcggacactgaacctgtcttccgtcacagtattgtgtcagaatcggctgccttacattcggtctggaaagataatctgcaaacagttcgtccaccactgtagaaatggagtcaaaaacatttcgttccggaa

SEQ ID NO: 32074 - DNA, 109 bp, Unknown
  Description of Unknown: RightRegion for integrase B6075 sequence
aaaattgtctacgaccgagaacaagattctctgaaaatctattatttcttatatcagtaaaatacccgcaaaccactgtaaaataagggcttgcgggttctttatacgt

SEQ ID NO: 32075 - DNA, 109 bp, Unknown
  Description of Unknown: RightRegion for integrase B6076 sequence
attgtttacgatcgggaatccgatactctgaaaattcatttctttttataccactcataatgccggaaacccgcgtatttacaggctttccggctactttataggttgt

SEQ ID NO: 32076 - DNA, 109 bp, Unknown
  Description of Unknown: RightRegion for integrase B6077 sequence
attgtttacgatcgggaatccgatactctgaaaattcatttctttttataccactcataatgccggaaacccacgtatttacgggctttccggctactttataggttgt

SEQ ID NO: 32077 - DNA, 109 bp, Unknown; identical to SEQ ID NO: 32075
  Description of Unknown: RightRegion for integrase B6078 sequence

SEQ ID NO: 32078 - DNA, 260 bp, Unknown
  Description of Unknown: RightRegion for integrase B6079 sequence
agaccgcaacatatttttcccacgatacttttcaaatttttatatttttttcaaagatagaaaaaaacagccgcctcagattgttccgatgatgtttgacaagcaaaatccaaaaaactgacaagcaaaacgcaaaaaagtgatgaaatgtttcaacaaaacgaaacactcatcactttttttgaattatcgagaatttttgaaacgtattttttacagctctaaaatgtcatttaaatcgcattttaaaaatctgcaaa

SEQ ID NO: 32079 - DNA, 260 bp, Unknown
  Description of Unknown: RightRegion for integrase B6080 sequence
cgaacgatgatgacggtcgtgaacggggccgtttacctcatgcttcagcgcgcggcctagcgcaccctgagcttctgaccggcgttgatcttgttaggatcactgattccgttcatctgggcaagcttggtgtaggtagtgccgtatttctgggcgatgccggaaagcgtgtctccgggcttaactgtgtagtacacggcagaagatgcaccgagcttcttgttgacctcggtctgaacggcgtctgcatcgtagccagc

SEQ ID NO: 32080 - DNA, 109 bp, Unknown
  Description of Unknown: RightRegion for integrase B6081 sequence
attgtttacgatcgggaatccgatactctgaaaattcatttctttttatatcactcataatgccggaaacccgcgtatttacgggctttccggctactttataggttgt

SEQ ID NO: 32081 - DNA, 260 bp, Unknown
  Description of Unknown: RightRegion for integrase B6082 sequence
attatttacgatcgggaatccgatactctgaaaattcatttctttttataccactcataatgccggaaacccacgtatttacgggctttccggctactttataggttgtgacaatttggtcatccagttcggacactgaacctgtcttccgtcacagtattgtgtcagaatcggctgccttacattcggtctggaaagataatctgcaaacagttcgtccaccactgtagaaatggagtcaaaaacatttcgttccggaa

SEQ ID NO: 32082 - DNA, 109 bp, Unknown
  Description of Unknown: RightRegion for integrase B6083 sequence
attgtttacgatcgggaatccgatactctgaaaattcatttctttttataccactcataatgccggaaaccctcgtatttacgggctttccggctactttataggttgt

SEQ ID NO: 32083 - DNA, 260 bp, Unknown
  Description of Unknown: RightRegion for integrase B6084 sequence
cgaacgatgatgaccgtcgtgaacggggcggtctacctcatgatgccgcgagcggcctaaagaagctggttaacgcgcgcctgaaccgcatcgtacaaagaaccgagccgacgcttgcgctcctcgccgttgccgtagtcgccacgaataacggcgcgggcaagcgcgtcgatgtcggcacctccggacgagccgccgtcagcgccaagaagctcgttgacgcgcgcctgaaccgcgtcgtagttggagccgagcgcggc

SEQ ID NO: 32084 - DNA, 122 bp, Unknown
  Description of Unknown: RightRegion for integrase B6085 sequence
attgtttacgatcgggaatccgatactctgaaaattcatttctttttataccactcataatgccggaaacccacgtatttacaggctttccggctactttataggttgtgacaatttggtca

SEQ ID NO: 32085 - DNA, 260 bp, Unknown
  Description of Unknown: RightRegion for integrase B6086 sequence
cgaaccgaggtgtgcgcagtcggcacgatcatcttcgttaggataccacgagcggcctaggaaacaaccaggcgcatgccgggatagatcagattcgggtttgagatgccgttcttggcggcgagatcctgataggtcgtgccgtactttgaggcgattccagaaagggtgtcgccgctctgcaccacgtacacctgctcggtctcggcctggtcgttgattaccgccataacctcgtcgtagcgcggccccaaaacagc

SEQ ID NO: 32086 - DNA, 109 bp, Unknown; identical to SEQ ID NO: 32020
  Description of Unknown: RightRegion for integrase B6087 sequence

SEQ ID NO: 32087 - DNA, 260 bp, Unknown
  Description of Unknown: RightRegion for integrase B6088 sequence
aaaattatctacgaccgagaacaagattctctgaaaatctattatttcttatatcagtaaaatacccgcaaaccactgtaaaataagggtttgcgggttctttatacgttgtagcaaaaaggttgacacagtggggctcaaagaccttaggtgatcaaggctatactcccatccaaattctgcgttactactacggtgatgacatgtatattaacactgccagtgcaatttccggtattccatcgtcctggccgggttac

SEQ ID NO: 32088 - DNA, 145 bp, Unknown
  Description of Unknown: RightRegion for integrase B6089 sequence
accaattctcctatggtggaggcgcggagaatcgaactccggtccacgaaagccccctgattggcatctccaagctcagtcgctggttttgtctcggacgctttgcgcgcagcgacacgctcgcggcgtcctaaccggttcggtc

SEQ ID NO: 32089 - DNA, 109 bp, Unknown; identical to SEQ ID NO: 32076
  Description of Unknown: RightRegion for integrase B6090 sequence

SEQ ID NO: 32090 - DNA, 260 bp, Unknown
  Description of Unknown: RightRegion for integrase B6091 sequence
agaccgcaacatatttttcccacgatacttttcaaatttttatacttttttcaaagatagaaaaaaatcagccgaaatgataaatatatgacacgaaatttgcacacgctaaaattttgctctgaaaatatgtacaaaaagcaagtctatatttgtgcaatcctacaaaattcaatgttatctatatttttgttatctaactgcttgactttttctagataacatggtatactataatcacagacaagagatgagacttg

SEQ ID NO: 32091 - DNA, 260 bp, Unknown
  Description of Unknown: RightRegion for integrase B6092 sequence
attgtttacgatcgggaatccgatactctgaaaattcatttctttttataccactcataatgccggaaacccacgtatttacaggctttccggctactttataggttgtgacaatttggtcatccagttcggacactgaacctgtcttccgtcacagtattgtgtcagaatcgactgccttacattcggtctggaaagataatctgcaaacagttcgtccaccactgtagaaatggagtcaaaaacatttcgttccggaa

SEQ ID NO: 32092 - DNA, 260 bp, Unknown
  Description of Unknown: RightRegion for integrase B6093 sequence
tggtggagccgaggggaatcgaaccccataaataaatttaaaaaactgttgcggcactagcaatttttattttttatttccaattccgttgccaatttgcgttttttcatcgcttcggcggtgaagtagtcgcagaagtcgctggagcgtttggcaatatctttctgggcgaggtgcgtgtagatattgtgcatggtggacaagtcgctccacccgccgatttcggcggcgatcatttccggaatctgcaagtggtaggc

SEQ ID NO: 32093 - DNA, 260 bp, Unknown
  Description of Unknown: RightRegion for integrase B6094 sequence
gtgtttaataaaaaagagtccactattgatgtttacttttatacctccaaccccttgtaaatactggggttggagagagtttatacgcaaacgcaatctggtcatccagctcggacaggagaccttctgtccgtcacagtactgcgtcagaatcggctgcttcacattaggtctcgacagatagttttcaaacatttcatttactatcagcgagatattgtcatatatatttctgccatagatgaatttgtggtcatatg

SEQ ID NO: 32094 - DNA, 260 bp, Unknown
  Description of Unknown: RightRegion for integrase B6095 sequence
attgtttacgatcgggaatccgatactctgaaaattcatttctttttatatcactcataatgccggaaacccgcgtatttacaggctttccggctactttataggttgtgacaatttggtcaaccattttgccacaaccgataaagttatttcttcttattttaaaggaatgccatttgtggcactatctaaactgaatcgcctcaatctgcaatgcctgtccgactgtacctagtgtagatacaccgtcagctttcgtc

SEQ ID NO: 32095 - DNA, 109 bp, Unknown; identical to SEQ ID NO: 32082
  Description of Unknown: RightRegion for integrase B6096 sequence

SEQ ID NO: 32096 - DNA, 260 bp, Unknown
  Description of Unknown: RightRegion for integrase B6097 sequence
attgtttacgatcgggaatccgatactctgaaaattcatttctttttataccactcataatgccggaaacccgcgtatttacgggctttccggctactttataggttgtgacaatttggtcatccagttcggacactgaacctgtcttccgtcacagtattgtgtcagaatcggctgccttacattcggtctggaaagataatctgcaaacagttcgtccaccactgtagaaatggagtcaaaaacatttcgttccggaa

SEQ ID NO: 32097 - DNA, 109 bp, Unknown
  Description of Unknown: RightRegion for integrase B6098 sequence
attgtttacgatcgggaatccgatactctgaaaattcatttctttttataccactcataatgccagaagcccacgtatttacgggctttccggctactttataggttgt

SEQ ID NO: 32098 - DNA, 260 bp, Unknown
  Description of Unknown: RightRegion for integrase B6099 sequence
aaaaaaaagaagaccgctccatcagacttccagttgactatcgacctgaaatacaactagaccccgcaaaccattgcagggcctaacattttctcgactttaaaagtgctaagtcttccgagaaagaattagcactttataatctaaatatcctcatgttttaagtacgcaggcaacgtagacatctcactcgttgtcctgcacatactccatcaaaatccactacatattacctccctcaattttcagaaatagcaaat

SEQ ID NO: 32099 - DNA, 260 bp, Unknown
  Description of Unknown: RightRegion for integrase B6100 sequence
attgtttacgatcgggaatccgatactctgaaaattcatttctttttataccactcataatgccggaaacccacgtatttacgggctttccggctactttatcggttgtggcaatttggtcatccagttcggacactgaacctgtcttccgtcacagtattgtgtcagaatcggctgccttacattcggtctggaaagataatctgcaaacagttcgtccaccactgtagaaatggagtcaaaaacatttcgttccggaa

SEQ ID NO: 32100 - DNA, 260 bp, Unknown
  Description of Unknown: RightRegion for integrase B6101 sequence
gtgttagtaaaggaagttatcgtagaagggaaagagaaaataaacattaactacttctagctaggtaatgacataagtatttcgttttcaatacaacgagctgcataagttgcaagttttgttcctttatcagtggaataactttcaactcctttaatcaaaccaattgtgccaattgaaataaggtcttctgcatcttctcctgtattttcaaactttttaacaatatgtgccactaatcggagattatgttcgattag

SEQ ID NO: 32101 - DNA, 260 bp, Unknown
  Description of Unknown: RightRegion for integrase B6102 sequence
attgtttacgatcgggaatccgatactctgaaaattcatttctttttataccactcataataccggaaacccgcgtatttacgggctttccggctactttataggttgtggcaatttggtcatccagttcggacactgaacctgtcttccgtcacagtattgtgtcagaatcggctgccttacattcggtctggaaagataatctgcaaacagttcgtccaccactgtagaaatggagtcaaaaacatttcgttccggaa

SEQ ID NO: 32102 - DNA, 109 bp, Unknown
  Description of Unknown: RightRegion for integrase B6103 sequence
aaaattgtctacaaccgagaacaagattctctgaaaatctattatttcttatatcagtaaaatacccgcaaaccactgtaaaataagggcttgcgggttctttatacgt

SEQ ID NO: 32103 - DNA, 260 bp, Unknown
  Description of Unknown: RightRegion for integrase B6104 sequence
aaaattgtctacgaccgagaacaagattctctgaaaatctattatttcttatatcagtaaaatacccgcaaaccactgtaaataagggtttgcgggttctttatacgttgtagcaaaaaggttgacacagtggggttcaaagaccttaggtgatcaaggctatactcccatccaaattctgcgttactactacggtgatgacatgtatattaacactgccagtgcaatttccggtattccatcgtcctggccgggttacg

SEQ ID NO: 32104 - DNA, 109 bp, Unknown
  Description of Unknown: RightRegion for integrase B6105 sequence
accaattctcttatggtggaggcacggagaatcgaactccggtccacgaaagttccctgatcggcatctccaggctcagtcactcatttagtctcggacgcgttgcgcg

SEQ ID NO: 32105 - DNA, 109 bp, Unknown; identical to SEQ ID NO: 32076
  Description of Unknown: RightRegion for integrase B6106 sequence

SEQ ID NO: 32106 - DNA, 260 bp, Unknown
  Description of Unknown: RightRegion for integrase B6107 sequence
agaccgcaacatatttttcccacgatacttttcaaatttttatacttttttcaaagatagaaaaaaatcagccgcctcagatcactccgaggcggctgaaatactatctgatatactttctccgaccgcaacgtatcttctgtacgatacgttgtgcgtgtctccaatctttttccgatatcaacggctcatagtcgccctgatataaatgccccttaaagctataatagccgatgtaaacaggtcgtgttactattttc

SEQ ID NO: 32107 - DNA, 109 bp, Unknown; identical to SEQ ID NO: 32076
  Description of Unknown: RightRegion for integrase B6108 sequence

SEQ ID NO: 32108 - DNA, 260 bp, Unknown
  Description of Unknown: RightRegion for integrase B6109 sequence
attgtttacgatcgggaatccgatactctgaaaattcatttctttttataccactcataatgccggaaacccgcgtatttacgggatttccggctactttataggttgtgacaatttggtcaaccattttgccacaacctataaagttatttcttcttattttaagggaattataagtcctcatgtttggcgctgtcaaccgtgatttatttcacccgcagtctctgaccaacatagatcacattcggattgctgattcc

SEQ ID NO: 32109 - DNA, 109 bp, Unknown
  Description of Unknown: RightRegion for integrase B6110 sequence
aaaattgtctacgagcgagaacaagattctctgaaaatctattatttcttatatctgtaaaatacccgcaaaccactgtaaaataagggcttgcgggttctttatacgt

SEQ ID NO: 32110 - DNA, 109 bp, Unknown
  Description of Unknown: RightRegion for integrase B6111 sequence
attgtttacgatcgggaatccgatactctgaaaattcatttctttttatatcactcataatgccggaaacccacgtatttacgggctttccggctactttataggttgt

SEQ ID NO: 32111 - DNA, 171 bp, Unknown
  Description of Unknown: RightRegion for integrase B6112 sequence
attgtttacgatcgggaatccgatactctgaaaattcatttctttttataccactcataatgccggaaacccacgtatttacaggctttccggctactttataggttgtggcaatttggtcatccagttcggacactgaacctgtcttccgtcacagtattgtgtcagaat

SEQ ID NO: 32112 - DNA, 260 bp, Unknown
  Description of Unknown: RightRegion for integrase B6113 sequence
attgtttacgatcgggaatccgatactctgaaaattcatttctttttatatcactcataatgccggaaacccacgtatttacaggctttccggctactttataggttgtgacaatttggtcaaccattttgccacaacctataaagttatttcttcttattttaagggaattataagtcctcatgtttggtactgtcaaccgcgatttatttcacccgcaatctctgaccaacatagatcacattcggattgctgattcc

SEQ ID NO: 32113 - DNA, 260 bp, Unknown
  Description of Unknown: RightRegion for integrase B6114 sequence
attgtttacgatcgggaatccgatactctgaaaattcatttctttttataccactcataatgccggaaacccgcgtatttacgggctttccggctactttataggttgtgacaatttggtcatccagttcggacactgaacctgtcttccgtcacagtattgtgtcagaatcggctgccttacattcggtctggaaagataatctgcaaacagttcgtccaccactgtagaaatggagtcaaaaacattccgttccggaa

SEQ ID NO: 32114 - DNA, 260 bp, Unknown
  Description of Unknown: RightRegion for integrase B6115 sequence
aaaattgtctacgaccgagaacaagattctctgaaaatctattatttcttatatcagtaaaatacccgcaaaccactgtaaaataagggtttgcgggttctttatacgttgtagcaaaaaggttgacacagtggggctcaaagaccttaggtgatcaaggctatactcccatccaaattctgcgttactactacggtgatgacatgtatattaacactgccagtgcaatttccggtattccatcgtcctggccgggttac

SEQ ID NO: 32115 - DNA, 258 bp, Unknown
  Description of Unknown: RightRegion for integrase B6116 sequence
accaattcttgcatggtggaggtgcggagaatcgaactccggtccaaagcaagcccctgacaggtgtctccaggctcagtggccggttgggtctcggacgccgcgcacccggtcacccgcgcttggcgtcccagccggttcggcctttgcgcgcggcataccgactacgtccgcgcgcgcatctccctgagatgacgtcgccccgggaacgggagcaatccccggtttgacgcgccgctatctaattaagcagcgaga

SEQ ID NO: 32116 - DNA, 109 bp, Unknown
  Description of Unknown: RightRegion for integrase B6117 sequence
aaaattgtctacaaccgagaacaagattctctgaaaatctattatttcttatatcagtaaaatacccgcaaaccactgtaaaataagggtttgcgggttctttatacgt

SEQ ID NO: 32117 - DNA, 260 bp, Unknown; identical to SEQ ID NO: 32096
  Description of Unknown: RightRegion for integrase B6118 sequence

SEQ ID NO: 32118 - DNA, 109 bp, Unknown; identical to SEQ ID NO: 32076
  Description of Unknown: RightRegion for integrase B6119 sequence

SEQ ID NO: 32119 - DNA, 109 bp, Unknown; identical to SEQ ID NO: 32076
  Description of Unknown: RightRegion for integrase B6120 sequence

SEQ ID NO: 32120 - DNA, 260 bp, Unknown
  Description of Unknown: RightRegion for integrase B6121 sequence
aaaattatctacgaccgagaacaagattctctgaaaatctattatttcttatatcagtaaaatacccgcaaaccactgtaaaataagggcttgcgggttctttatacgttgtagcaaaaaggttgacacagtggggctcaaagaccttaggtgatcaaggctatactcccatccaaattctgcgttactactacggtgatgacatgtatattaacactgccagtgcaatttccggtattccatcgtcctggccgggttac

SEQ ID NO: 32121 - DNA, 260 bp, Unknown
  Description of Unknown: RightRegion for integrase B6122 sequence
attgtttacgatcgggaatccgatactctgaaaattcatttctttttataccactcataatgccgggaacccacgtatttacgggctttccggctactttataggttgtggcaatttggtcatccagttcggacactgaacctgtcttccgtcacagtattgtgtcagaatcggctgccttacattcggtctggaaagataatctgcaaacagttcgtccaccactgtagaaatggagtcaaaaacatttcgttccggaa

SEQ ID NO: 32122 - DNA, 260 bp, Unknown
  Description of Unknown: RightRegion for integrase B6123 sequence
attgtttacgatcgggaatccgatactctgaaaattcatttctttttataccactcataatgccggaaacccacgtatttacgggctttccggctactttataggttgtgacaatttggtcatccagttcggacactgaacctgtcttccgtcacagtattgtgtcagaatcggctgccttacattcggtctggaaagataatctgcaaacagttcgtccaccactgtagaaatggagtcaaaaacatttcgttccggaa

SEQ ID NO: 32123 - DNA, 260 bp, Unknown
  Description of Unknown: RightRegion for integrase B6124 sequence
attgtttacgatcgggaatccgatactctgaaaattcatttctttttataccactcataatgccggaaaccctcgtatttacgggctttccggctactttataggttgtaacaatttggtcatccattttgccacaaccgataaagttatttcttcttattttaagggaattgtaagtcctcatgtttggtgctgtcaaccgtgatttatttcacccgcagtctctgaccaacatagatcacattcggattgctgattcc

SEQ ID NO: 32124 - DNA, 109 bp, Unknown
  Description of Unknown: RightRegion for integrase B6125 sequence
attgtttacgatcgggaatccgatactctgaaaattcatttctttttataccactcataatgccggaaacccacgtatttacgggctttccagctactttataggttgt

SEQ ID NO: 32125 - DNA, 109 bp, Unknown
  Description of Unknown: RightRegion for integrase B6126 sequence
gtgtttaataaaaaagagtccactattgatgtttacttttatacctccaaccccttgtaaatactggggttggagagagtttatacgcaaatgcaatctggtcatccag

SEQ ID NO: 32126 - DNA, 260 bp, Unknown
  Description of Unknown: RightRegion for integrase B6127 sequence
atatttaacaaactgatttacaacccatttgacgatagtattgacatagaatttacatagtatcggttatgtattcaaaggacagcctctgcttccttcgtaataaactattttattgcttaaatcctcctcttcctcataaggaaatacaatctcatccatagacattagtggtctacttgcattcgatagaaccttattatttactttataatgtaatcctcttatatcctctatttctcttaatccaagcttatatt

SEQ ID NO: 32127 - DNA, 109 bp, Unknown
  Description of Unknown: RightRegion for integrase B6128 sequence
aaaattatctacgaccgagaacaagattctctgaaaatctattatttcttatatcagtaaaatacccgcaaacacctgtaaaataagggcttgcgggttctttatatgt

SEQ ID NO: 32128 - DNA, 260 bp, Unknown
  Description of Unknown: RightRegion for integrase B6129 sequence
attgtttacgatcgggaatccgatactctgaaaattcatttctttttataccactcataatgccggaaacccgcgtatttacgggatttccggctactttataggttgtgacaatttggtcatccagttcggacactgaacctgtcttccgtcacagtattgtgtcagaatcggctgccttacattcggtctggaaagataatctgcaaacagttcgtccaccactgtagaaatggagtcaaaaacattccgttccggaa

SEQ ID NO: 32129 - DNA, 109 bp, Unknown; identical to SEQ ID NO: 32076
  Description of Unknown: RightRegion for integrase B6130 sequence

SEQ ID NO: 32130 - DNA, 109 bp, Unknown
  Description of Unknown: RightRegion for integrase B6131 sequence
attatttacgatcgggaatccgatactctgaaaattcatttctttttataccactcataatgccggaaacccacgtatttacaggctttccggctactttataggttgt

SEQ ID NO: 32131 - DNA, 260 bp, Unknown
  Description of Unknown: RightRegion for integrase B6132 sequence
aaaattgtctacaaccgagaacaagattctctgaaaatctattatttcttatatcagtaaaatacccgcaaaccactgtaaataagggtttgcgggttctttatacgttatagcaaaaaggttgaccattttgtcaggacgtataaagtaaatttcttcctattataatgggaatttacacataaaataaggaggcatttcagccccctagtattcattattcagttttaatttggtgtagatctacgatggcctccaac

SEQ ID NO: 32132 - DNA, 260 bp, Unknown
  Description of Unknown: RightRegion for integrase B6133 sequence
cgaacgatgatggccgtcctgaacggggccgtctacctgcgcttcagccgcgcggcctagctcgcgggcttcatgacgccagcggtgaccatggcgtcgcgcagggagatgaactcggccttggtcggcgtgtcaccggcggggtcggccacgtagtcggcctgcgtgacctcgctctcggggagcccctcgatgtagaggctcacctcctgagcgcccttctgcttggtcggggtgtacttggcgttgatcgtctgcat

SEQ ID NO: 32133 - DNA, 109 bp, Unknown; identical to SEQ ID NO: 32074
  Description of Unknown: RightRegion for integrase B6134 sequence

SEQ ID NO: 32134 - DNA, 260 bp, Unknown
  Description of Unknown: RightRegion for integrase B6135 sequence
attgtttacgatcgggaatccgatactctgaaaattcatttctttttataccactcataatgccggaaacccgcgtatttacgggctttccggctactttataggttgtggcaatttggtcatccagttcggacactgaacctgtcttccgtcacagtattgtgtcagaatcggctgccttacattcggtctggaaagataatctgcaaacagttcgtccaccactgtagaaatggagtcaaaaacatttcgttccggaa

SEQ ID NO: 32135 - DNA, 109 bp, Unknown
  Description of Unknown: RightRegion for integrase B6136 sequence
gtgtttgacaagaaaaatgacagacttgacgtctactactaccttgcgaaaacccagtaaatacaagggtttcaggaagttgtatgttgttacaaaaaggttgacacag

SEQ ID NO: 32136 - DNA, 109 bp, Unknown
  Description of Unknown: RightRegion for integrase B6137 sequence
aaaattgtctacgaccgagaacaagattctctgaaaatctattatttcttatatcagtaaaacacccgcaaaccactgtaaaataagggcttgcgggttctttatacgt

SEQ ID NO: 32137 - DNA, 260 bp, Unknown
  Description of Unknown: RightRegion for integrase B6138 sequence
gtttacgacaaagaaaatgacacactaaatgcttactattatctcgcaaaacctcagtaaaatcaaggatttgcagtggttgtatgttcttgcaattgggttgacacagtggggttctaaggcactcggcgaccaaggatactcacctattgaaattctgcgctactactacggtgacaatatgtacattaatactgctcaggaaatttccggcgtaccttcctcgtggcctggctataccctttccaatggttcttccg

SEQ ID NO: 32138 - DNA, 109 bp, Unknown
  Description of Unknown: RightRegion for integrase B6139 sequence
attgtttacgatcgggaatccgattctctgaaaattcatttctttttataccactcataatgccggaaacccgcgtatttacaggctttccggctactttataggttgt

SEQ ID NO: 32139 - DNA, 109 bp, Unknown
  Description of Unknown: RightRegion for integrase B6140 sequence
attgtttacgatcgggaatccgatactctgaaaattcatttctttttataccactcataatgccggaaaccaacgtatttacgggctttccggctactttataggttgt

SEQ ID NO: 32140 - DNA, 260 bp, Unknown
  Description of Unknown: RightRegion for integrase B6141 sequence
attgtttacgatcgggaatccgatactctgaaaattcatttctttttataccactcataatgccggaaaccctcgtatttacgggctttccggctactttataggttgtgacaatttggtcatccagttcggacactgaacctgtcttccgtcacagtattgtgtcagaatcggctgccttacattcggtctggaaagataatctgcaaacagttcgtccaccactgtagaaatggagtcaaaaacattccgttccggaa

SEQ ID NO: 32141 - DNA, 109 bp, Unknown; identical to SEQ ID NO: 32102
  Description of Unknown: RightRegion for integrase B6142 sequence

SEQ ID NO: 32142 - DNA, 109 bp, Unknown; identical to SEQ ID NO: 32076
  Description of Unknown: RightRegion for integrase B6143 sequence

SEQ ID NO: 32143 - DNA, 109 bp, Unknown
  Description of Unknown: RightRegion for integrase B6144 sequence
aaaattatctacgaccgagaacaagattctctgaaaatctattatttcttatatcagtaaaatacccgcaaaccactgtaaaataagggcttgcgggttctttatacgt

SEQ ID NO: 32144 - DNA, 260 bp, Unknown
  Description of Unknown: RightRegion for integrase B6145 sequence
aaaattgtctacgagcgagaacaagattctctgaaaatctattatttcttatatcagtaaaatacccgcaaccccctgtaaaataagggtttgcgggttctttatacgttgtagcaaaaaggttgacttaattgtctttattaaacctccagctctgccggatcgaccccctgtttcttcagcttcagatatacgacttcccggaacagtgcatatgccaccgacacgatcggtataaatatcaacattccgaccacgcc

SEQ ID NO: 32145 - DNA, 260 bp, Unknown
  Description of Unknown: RightRegion for integrase B6146 sequence
attgtttacgatcgggaatccgatactctgaaaattcatttctttttataccactcataatgccggaaacccacgtatttacgggctttccggctactttataggttgtgacaatttggtcatccagttcggacactgaacctgtcttccgtcacagtattgtgtcagaatcggctgccttacattcggtctggaaagataatctgcaaacagttcgtccaccactgtagaaatggagtcaaaaacattccgttccggaa

SEQ ID NO: 32146 - DNA, 260 bp, Unknown
  Description of Unknown: RightRegion for integrase B6147 sequence
gagaatatttacaaaatcatggtgaatttcgactgcgtttatatgatagaaacttgttaggtggcttataccgagaaaatccagtaaaatcaaggaattatgaagcggttaagagtagtaaaaagtgggaaaatgtaggtaattcatacattattcctgcactactcctataccgctattcctatatttgagcgtcaaatacaagtcattttattttttctatttcagttctgagccattcaaattctctggctgtatac

SEQ ID NO: 32147 - DNA, 109 bp, Unknown; identical to SEQ ID NO: 32136
  Description of Unknown: RightRegion for integrase B6148 sequence

SEQ ID NO: 32148 - DNA, 260 bp, Unknown
  Description of Unknown: RightRegion for integrase B6149 sequence
aaggaagccggaacgcttgactgcttcctgaatacttccatcgaaaagatttcaaaatagacaaagcccctgttttcggggctttgcgtcaccactaaacttgccgaatacggaccgccgtattgactgatgatcaccatcgccgccttcggatctgtcctggtaatatgaaccggatattccagtcttttttcataattaaacatatgacaaactccattctattttattaaatatgaaattaaaatgtcagaaacgcg

SEQ ID NO: 32149 - DNA, 115 bp, Unknown
  Description of Unknown: RightRegion for integrase B6150 sequence
atcatttatgacaaaccggcggattctcttaaaatttactactatctcacagagccgtaaaagcctatggttgacagctttttcgatggtttatctgttgtttccataaggatga

SEQ ID NO: 32150 - DNA, 260 bp, Unknown
  Description of Unknown: RightRegion for integrase B6151 sequence
gctactatttcggatttggacttatcaagtccaccattcgggccgtactcgaacacgtgagtgcgggcccttttctcggatattgtaaaatatcagcgcctcatcgttgcggagctcgactcgggcgatgaacgtgtcaaccaaccgagcgcggaagtcgtcatccgtgacgtctccgacgcggaaggagcgcagccaggcctcgaccacctcacgggtgagtcggggcctttttatttctgcccgctggatctccagca

SEQ ID NO: 32151 - DNA, 166 bp, Unknown
  Description of Unknown: RightRegion for integrase B6152 sequence
gaaaaaattgtatttaacaaggaaactgacactgcggagatatactattactacctgtaaatccctttgtttatgcggggtttgcggttttctatgttattacggtaaggttgaccttattgtaagaacatagaaataatgaagaagatgatacaatattaatccc

SEQ ID NO: 32152 - DNA, 260 bp, Unknown
  Description of Unknown: RightRegion for integrase B6153 sequence
cgcattgatattgatggggaggatataaccattcactggctgttcgctcctgaaaactaaaaaaaggcggggcttgcgccctgccttttcttattctttagccgttactgctgccgcctgggtcgcgtgacaaacaaacaatcacctccacgtgcttcgtccttggaaacagatccaccggctgcaccttttctgcatggtacccattcttctccagccatgcggcgtctcgggcggcggtggcggggttgcagctgaca

SEQ ID NO: 32153 - DNA, 260 bp, Unknown
  Description of Unknown: RightRegion for integrase B6154 sequence
cgcattgatattgatggggaggatataaccattcactggctgttcgctcctggaaactaaaaaaggcggggcttgcgccctgccttttctcattctttagccgttactgctgccgcctgggtcgcgtgacaaacaaacaatcgcctctacgtgccttgtccttgggaacaaatccacgggctgaaccttttccagcgtatatccctgttcacacaggaacttagcatcgcgggcggcggtggaggggttgcagctgacca

SEQ ID NO: 32154 - DNA, 260 bp, Unknown
  Description of Unknown: RightRegion for integrase B6155 sequence
atcatatttaaaaaactaaaatatgatccttataaagattctataaacatagagttttaatagtatcggttatgtgttaagaggacatccttttgatacataaatgatatagcacttattttttaagtgctatttttgtttcctctaatattttgcttatttctttatatgaatatccctttagtagtttatataattctttttttatctcatccatgagccattctcctttgtaaaaactttataaaaattatatcaaa

SEQ ID NO: 32155 - DNA, 260 bp, Unknown
  Description of Unknown: RightRegion for integrase B6156 sequence
aaggaagccggaacgcttgactgcttcctgaatacttccatcgaaaagatttcaaaatagacaaatccccgaaaacaggggctttgtgccacccctaaacttgccgaatacggaccgccgtactgactgatgatcaccatcgccgccttcggatctgtcctggtaatatgaaccggatattccagtcttttttcataattaaacatatgacaaactccattctattttattaaatatgaaattaaaatgtcagaaacgcg

SEQ ID NO: 32156 - DNA, 260 bp, Unknown
  Description of Unknown: RightRegion for integrase B6157 sequence
cgcattgatattgatggggaggatataaccattcactggctgttcgctcctggaaactaaaaaaggcggggcttgcgccctgccttttctcattctttagccgttactgctgccgcctgggtcgcgtgacaaacaaacaatcacctccacgtgccttgtccttgggaataaatccacgggctgaaccttttccagcgtatacccctgttcacacaggaacttagcatcgcgggcggcggtggaggggttgcagctgacca

SEQ ID NO: 32157 - DNA, 260 bp, Unknown
  Description of Unknown: RightRegion for integrase B6158 sequence
aaaagtatgatcgaccgagtggttttgagtgaagatggcgtggatgttcggttcaaataacacgcaggagatgtaaaatttagaaatgagctattccaaatctgagatatgaaatagctcattcatttattgatcttctctttgcaacaaaataatttttaaaagctctggatgtttttctaacaattcttgctggcgctttatttgtttttctctttcttcttccgtaataataataaatttataatcacgtttttcat

SEQ ID NO: 32158 - DNA, 260 bp, Unknown
  Description of Unknown: RightRegion for integrase B6159 sequence
atcatatttaaaaaactaaaatatgatccttataaagattctataaacatagagttttaatagtatcggttatgtgttaagaggacagccccttgatgcctcgtaatacactatcttattatctaaatcttcatccatcttatatgggaaaactatttcattcatactcataagaggtctattaccatttcctattacttcattgccttctttaaaatataatcctcttatacttctaatctctcttttcccaaggcaat

SEQ ID NO: 32159 - DNA, 77 bp, Unknown
  Description of Unknown: RightRegion for integrase B6160 sequence
aagggttcgtctaactttcatgtggtggagacgagggggatcgaacccctgacctcttgactgccagtcaagcgctc

SEQ ID NO: 32160 - DNA, 260 bp, Unknown
  Description of Unknown: RightRegion for integrase B6161 sequence
cgcattgatattgatggggaggatataaccattcactggctgttcgctcctgaaaactaaaaaaggcggggcttgcgccctgccttttcttattctttagccgttactgctgccgcctgggtcgcgtgacaaacaaacaatcacctcgaccattgtttcattttccaagggcaattctttcacttctgtcccattcactggaacggggaagttgaagataatcttcctgatccagttgccatccggctgcctttccggga

SEQ ID NO: 32161 - DNA, 260 bp, Unknown
  Description of Unknown: RightRegion for integrase B6162 sequence
cgcattgatattgatggggaggatataaccattcactggctgttcgctcctgaaaactaaaaaaggcggggcttgcgccctgccttttcttattctttagccgttactgctgccgcctgggtcgcgtgacaaacaaacaatcacctcaatatgtgtatcattgtccaaactcaaactcatatcttcctcaataatcggaagcttgaatttaatggatttgagccactgaccgttcggctgccgttcctcatagatatgga

SEQ ID NO: 32162 - DNA, 260 bp, Unknown
  Description of Unknown: RightRegion for integrase B6163 sequence
tacaataaagaggaagacaccctcgaagtgtattactactacaagccgcaaacccagtaaccatgcgggtttgcgtgtgtttgtacgtccttgcaaaaaggtcaaccagtttggacaactcaccctgcggccatcacaatactgtgtcaggattggctggcgcacattcggccgtgacagatagtctgcaaacagttcatccacaatcactgaaataggctcaaatatattgcgctccgggatccatttatggtcaaatg

SEQ ID NO: 32163 - DNA, 109 bp, Unknown; identical to SEQ ID NO: 32074
  Description of Unknown: RightRegion for integrase B6164 sequence

SEQ ID NO: 32164 - DNA, 109 bp, Unknown
  Description of Unknown: RightRegion for integrase B6165 sequence
aaggaagccggaacgcttgactgcttcctgaatacttccatcgaaaagatttcaaaatagacaaagcctcggttttcggggctttgtgtcgccactatacttgccgagt

SEQ ID NO: 32165 - DNA, 260 bp, Unknown
  Description of Unknown: RightRegion for integrase B6166 sequence
aaggaagccggaacgcttgactgcttcctgaatacttccatcgaaaagatttcaaaatagacaaagctccgaaaacaggggctttgtgccacccctaaacttgccgaatacggaccgccgtattgactgatgatcaccatcgccgccttcggatctgtcctggtaatatgaaccggatattccagtcttttttcataattaaacatatgacaaactccattctattttattaaatatgaaattaaaatgtcagaaacgcg

SEQ ID NO: 32166 - DNA, 260 bp, Unknown
  Description of Unknown: RightRegion for integrase B6167 sequence
cgcattgatattgatggggaagatataaccattcactggctgttcgctcctgaaaactaaaaaaggcggggcttgcgccctgccttttcttattctttagccgttactgctgccgcctgggtcgcgtgacaaacaaacaatcacctcgactattgtttcattttccaagggcaattctttcacttctgttccattcaccgggacagggaagttgaagataatcttcctaatccagttgccatccggctgcttttccggga

SEQ ID NO: 32167 - DNA, 260 bp, Unknown
  Description of Unknown: RightRegion for integrase B6168 sequence
cgcattgatattgatggggaggatataaccattcactggctgttcgctcctgaaaactaaaaaaggcggggcttgcgccctgccttttctcattctttagccgttactgctgccgcctgggtcgcgtgacaaacaaacaatcacctccacgtgccttgtccttgggaacaaatccacgggctgaaccttttccagcgtatacccctgttcacacaggaacttagcatcgcgggcggcggtggaggggttgcagctgacca

SEQ ID NO: 32168 - DNA, 109 bp, Unknown
  Description of Unknown: RightRegion for integrase B6169 sequence
gcaggtagtggttcgcctgcgggtaaggatggggagccaataacagaaacagataggtaaagaaatatttacctatctgtttttttgttatatattattttttatagat

SEQ ID NO: 32169 - DNA, 260 bp, Unknown
  Description of Unknown: RightRegion for integrase B6170 sequence
aaaagtatgattgaccgagtggttttgagtgaggatggcgtggatgttcggttcaaataacacgcagaaggtataaattttaaaaatgagctattccaaatctgagatatgaaatagctcattcatttattgatcttctctttgcaacaaaataatttttaaaagctctggatgttcttctaacaattcttgctggcgctttatttgtttttctctttcttcttccgtaataataataaatttataatcacgtttttcat

SEQ ID NO: 32170 - DNA, 260 bp, Unknown
  Description of Unknown: RightRegion for integrase B6171 sequence
cgcattgatattgatggggaggatataaccattcactggctgttcgctcctgaaaactaaaaaaggcggggcttgcgccctgccttttcttattctttagccgttactgctgccgcctgggtcgcgtgacaaacaaacaatcacctccacgtgccttgtccttgggaacaaatccacgggctgaaccttttccagcgtatacccctgttcacacaggaacttagcatcgcgggcggcggtggaggggttgcagctgacca

SEQ ID NO: 32171 - DNA, 260 bp, Unknown
  Description of Unknown: RightRegion for integrase B6172 sequence
aaaagtatgattgaccgggtggttttgagtgaggatggcgtggatgtccggttcaaataaaaggaggaaaagcaatcgcttttcctcttttctttttgtttcctatgtatccacatcccactggatagaatcatacccattttcctttgccgttcggattacgttatcgttatactctccaaatggcgggcggaataaattcatatcaatgccggtcaattcttttacagcctgatgacacccttgcaattcctcagtga

SEQ ID NO: 32172 - DNA, 260 bp, Unknown
  Description of Unknown: RightRegion for integrase B6173 sequence
gccaaagatgcctcggagggcaatggttcggattttggttgcttcgctccaccaagataaaacacctagaaacgtaagtttctgggtgtttttcttttattgtaacccactaccaaacccactattttctctaaaaaaaataagggccgcagccctgtggcgggagctgcggcccgtgctattacttgccctgcgccttcaggcggtcaaaggtcttgtctgcttccagtgcagcggtgaacttggtggtgctgcccatc

SEQ ID NO: 32173 - DNA, 260 bp, Unknown
  Description of Unknown: RightRegion for integrase B6174 sequence
cgcattgatattgatggggaggatataaccattcactggctgttcgctcctgaaaactaaaaaaggcggggcttgcgccctgccttttcttattctttagccgttactgctgccgcctgggtcgcgtgacaaacaaacaatcacctccacgtgcttcgtcctcgggaacagatccaccggctggacctccacggctttatacccgtgctcggtcagccacttggcatcccttgccgctgttgcggcgttgcagctgacca

SEQ ID NO: 32174 - DNA, 260 bp, Unknown
  Description of Unknown: RightRegion for integrase B6175 sequence
agttcgactttagaacagttgtgcctattaaatcacccgttccaatatgaactggagtaataattttaactgtgctcatacttataccgaaaaaccaataccataatgataaatacatttaccttctgtcatggtctctattatccttccatagtattcttttttctgattcactttcatccaactaccctctaaaaaatgtacatattttccatttatgaagccacctgtatattctttagaagaacgataaatatccc

SEQ ID NO: 32175 - DNA, 260 bp, Unknown
  Description of Unknown: RightRegion for integrase B6176 sequence
gccaaaggtgccccagagggcaatggttcggatttgggttgcttcgctccaccaagataaaacacctagaaacgtgagtttctgggtgtttttcttttgctgtaacccacagtcaaacccacttttgcgggaaactatgcgaaaatcaagcaaaaataggctgccacgcatcacactcgcatggcagccgtttcgttaccctttcaccacggcattgtaaagcatctccaagaactgcaccgcgctgggtgcaccggtca

SEQ ID NO: 32176 - DNA, 109 bp, Unknown
  Description of Unknown: RightRegion for integrase B6177 sequence
tacaacaaagaaaaggacacccttgaagtgtattactactacaagccgcaaacccagtaaatacaagggtttgcgggtatttgtaggttcttgcaaaaaggtcaaccag

SEQ ID NO: 32177 - DNA, 109 bp, Unknown
  Description of Unknown: RightRegion for integrase B6178 sequence
aaaattgtctacgaccgagaacaagattctctgaaaatctattatttcttatatcagtaaaatacccgcaaaccactgtaaaataagggcttgcgggtattttatacgt

SEQ ID NO: 32178 - DNA, 260 bp, Unknown
  Description of Unknown: RightRegion for integrase B6179 sequence
cgaacccaggtactggcactcgggcgctccgtgttcatcagattttctcgggccgcctaaaatagcaactactgaaaaaggggaggtcccgcgaggagcctcccctttacttttggctatcccaccaccagcacttggccggggtagatcacgttcgggttcgccagaccgttcaccttggccagcgtccggtagtccgtgccgtacttggcggcgatgcccgagagcgtgtcgccgctcttgaccgtgtaggtcttctt

SEQ ID NO: 32179 - DNA, 260 bp, Unknown
  Description of Unknown: RightRegion for integrase B6180 sequence
aaccattcttccgtttcggtaaaatgttcggattccgaaagtgtgggtctgccagaatgaaacgctaatcttgataccaaggttagcgtttttttatgcattgaaaagccttgtcccataaggcttttcgcactctgccgggtgaaaacgccccttgctctactctcgcgagtgggtgcaaggggcgtttttttcaggtttagcagattccccggctactggctgggtgcaagatcaaacggcagcttcctgctacaata

SEQ ID NO: 32180 - DNA, 260 bp, Unknown
  Description of Unknown: RightRegion for integrase B6181 sequence
cgaacccaggtactggcgctcgggcgctccgtgttcatcagattttctcgggccgcctaaaatagcaactactgaaaaaggggaggtcccgcgaggagcctcccctttacttttggctatcccaccaccagcacttggccggggtagatcacgttcgggttcgccaacccgttcgccttggccagcgtccggtagtccatgccgtacttggcggcgattcccgagagcgtgtcgccgctcttgaccgtgtaggtcttctt

SEQ ID NO: 32181 - DNA, 260 bp, Unknown
  Description of Unknown: RightRegion for integrase B6182 sequence
cgcattgatattgatggggaggatataaccattcactggctgttcgctcctgaaaactaaaaaaggcggggcttgcgccctgccttttcttattctttagccgttactgctgccgcctgggtcgcgtgacaaacaaacaatcacctcgaccattgtttcattttccaagggcaattctttcacttccgtcccatttacaggaacagggaagttgaagatgatcttcctgatccagttaccgtccagctgcttttccggga

SEQ ID NO: 32182 - DNA, 109 bp, Unknown
  Description of Unknown: RightRegion for integrase B6183 sequence
tacaacaaagaaaaagacacacttgaagtgtattactactacaagccgcaaacccagtaaatacaagggtttgcgggtgtttgtatgtccttgcaaaaaggtcaaccag

SEQ ID NO: 32183 - DNA, 260 bp, Unknown
  Description of Unknown: RightRegion for integrase B6184 sequence
cgcattgatattgatggggaggatataaccattcactggctgttcgctcctgaaaactaaaaaaggcggggcttgcgccctgccttttcttattctttagccgttactgctgccgcctgggtcgcgtgacaaacaaacaatcacctccacgtgtcttgtccttgggaacaaatccacgggctgaaccttttccagcgtatacccctgttcacacaggaacttagcatcgcgggcggcggtggaggggttgcagctgacca

SEQ ID NO: 32184 - DNA, 260 bp, Unknown
  Description of Unknown: RightRegion for integrase B6185 sequence
tacaataaagaggaagacactctcgaagtgtattactactacaagccgcaaacccagtaaccatgcgggtttgcgtgtgtttgtacgtccttgcaaaaaggtcaaccagtttggacaactcactctgcgaccatcacaatactgtgtcaggattggctggcgcacattcggccgtgacagatagtctgcaaacagttcatccacaatcactgaaataggctcaaatatattgcgctccggtatccatttatggtcaaatg

SEQ ID NO: 32185 - DNA, 260 bp, Unknown
  Description of Unknown: RightRegion for integrase B6186 sequence
cgcattgatattgatggggaggatataaccattcactggctgttcgctcctgaaaactaaaaaaggcggggcctgcgccctgccttttcttattctttagccgttactgctgccgcctgggtcgcgtgacaaacaaacaatcacctcgacgtgtcctgtcctgagagtttggtatatcacttttgcgacccaacagccccggctattctggccggggccttttttattcggtttcgttgctgtcgtcggctatggctgcc

SEQ ID NO: 32186 - DNA, 260 bp, Unknown
  Description of Unknown: RightRegion for integrase B6187 sequence
gcgaaagatgccccagagggcaatggttcggatttggattgcttcgctccaccaagataaaacacctagagacgtaagtttctgggtgcttttcttttgctgtaacccacagttaaacccacttttgcgggaaactatgcgaaaatcagcaaaaataggctgccacgcatcacactcgcatggcagccttttcgttaccctctcaccacgacattgtaaagcatctctaggaactgcaccgcgctgggtgcaccggtcag

SEQ ID NO: 32187 - DNA, 260 bp, Unknown
  Description of Unknown: RightRegion for integrase B6188 sequence
tacaacaaagaaaaggacacacttgaagtgtattactactacaagccgcaaacccagtaaatacaagggtttgcgggtgtttgtaggttcttgcaaaaaggtcaaccagttcgggcagctcactctccgcccatcacaatactgcgtcaggatcggctgccgcacattgggtcttgaaagataatcagcaaacagttcatccacaatcacagaaatcgaatcaaaaatatttctctcaggaatccacttatggtcaaagg

SEQ ID NO: 32188 - DNA, 78 bp, Unknown
  Description of Unknown: RightRegion for integrase B6189 sequence
aagggttcgtctaattcaactcgggtggagacgagggggatcgaacccctgacctcttgactgccagtcaagcgctct

SEQ ID NO: 32189 - DNA, 260 bp, Unknown
  Description of Unknown: RightRegion for integrase B6190 sequence
cgcattgatattgatggggaagatataaccattcactggctgttcgctcctgaaaactaaaaaaggcggggcttgcgccctgccttttcttattctttagccgttactgctgccgcctgggtcgcgtgacaaacaaacaatcacctctacgtgtcctgtcctgagagtttggtatatcacttttgcgacccaacagccccggctattctggccggggccttttttattcggtttcgttgctgtcgtcggctatggctgcc

SEQ ID NO: 32190 - DNA, 260 bp, Unknown
  Description of Unknown: RightRegion for integrase B6191 sequence
aaggcaaagaagaccaagccggcggactttcaactccgtttcgaccttagatttctctgagactgccgttgctattttatccttcattatctataaggcgctatatcttcctctttgcaagaatcatagatcttcttcgtgtgtatgcacacggcctcgcggatacaggcagtatcctgcaccggaccgggcatgaccttctcaggcattgcaatacctcctagcagagtattcaaaaggcccttccttccccgctctat

SEQ ID NO: 32191 - DNA, 260 bp, Unknown
  Description of Unknown: RightRegion for integrase B6192 sequence
acatacaccaatgggagggcaggaaatgtcaacggaaaactacgtaaacaaaaaacctaagattacagtcataccggccaaacctcgccaggagatagttggccgccagagcgtcaacggtgagaagaccaaacttcgcgtggcagcatacgccagagtctccacagaccacgaggaacaggaaagcagttacgaggcgcaggtaaaacacttcacggagtacataacacagcgcgaagactggcagcttgccggaatct

SEQ ID NO: 32192 - DNA, 260 bp, Unknown
  Description of Unknown: RightRegion for integrase B6193 sequence
cgcattgatattgatggggaggatataaccattcactggctgttcgctcctgaaaactaaaaaaggcggggcttgcgccctgccttttcttattctttagccgttactgctgccgcctgggtcgcgtgacaaacaaacaatcacctccacatgtcctgtcctgagagtttggtatatcacttttgcgacccaacagccccggctattctggccggggccttttttattcggtttcgttgctgtcgtcggctatggctgcc

SEQ ID NO: 32193 - DNA, 109 bp, Unknown; identical to SEQ ID NO: 32168
  Description of Unknown: RightRegion for integrase B6194 sequence

SEQ ID NO: 32194 - DNA, 260 bp, Unknown
  Description of Unknown: RightRegion for integrase B6195 sequence
gaaaaaattgtatttaacaaagaaactgacacggcggagatatactattactacctgtaaacccctttgtttatgagcgttttacagttttctatgttattgtggtaaggatgaccttattgtaagaacatagaaataacgaagaaaatgatacaatattaatccccggcgacagccggggtttctttttacattcgtcctctaatgtcatttcttctgctctctcatattcctaaattttcttaggcctcttaaaatat

SEQ ID NO: 32195 - DNA, 109 bp, Unknown
  Description of Unknown: RightRegion for integrase B6196 sequence
tatgatcgtgattctgatgaattgaaagtgtattactattatacgccggaacccttgtaaatactgggttccgagcattttgtatgttgttgcaaaaaggtcatccaat

SEQ ID NO: 32196 - DNA, 260 bp, Unknown
  Description of Unknown: RightRegion for integrase B6197 sequence
aaggaagccggaacgcttgactgcttcctgaatacttccatcgaaaagatttcaaaatagacaaagccccgaaaacaggggctttgttccacccctaaacttgccgaatacggaccgccgtattgactgatgatcaccatcgccgccttcggatctgtcctggtaatatgaaccggatattccagtcttttttcataattaaacatatgacaaactccattctattttattaaatatgaaattaaaatgtcagaaacgcg

SEQ ID NO: 32197 - DNA, 260 bp, Unknown
  Description of Unknown: RightRegion for integrase B6198 sequence
aaggaagccggaacgcttgactgtttcctgaatacttccatcgaaaagatttcaaaatagacaaagcccctattttcggggctttgtgccaccactatacttgccgaatacggtggtcccgacggagaggccggagctgcaatgcgctatctgtcacagcgatattccatggaggaccgcaaggtggccggagccctgacagacatcggcaccgaagaattaggccatctggaaattgtcgcaaccatcatccaccagct

SEQ ID NO: 32198 - DNA, 260 bp, Unknown
  Description of Unknown: RightRegion for integrase B6199 sequence
gccaaagatgcctcagagggcaatggttcggatttgggttgcttcgctccaccaagataaaacacctagaaacgtaagtttctgggtgtttttcttttgccgtaacccacagtcaaacccactttttcgcgtggcagcctttttcgttaccccctcaccacggcattgtaaagcatctccaggaactgcaccgcgctgggtgcgccggtcagcgggtagccagccaactgctgaacgccttcgggattgagcgcccaggc

SEQ ID NO: 32199 - DNA, 109 bp, Unknown
  Description of Unknown: RightRegion for integrase B6200 sequence
aaaattgtctacaaccgagaacaagattctctgaaaatctattatttcttatatcggtaaaatacccgcaaaccactgtaaaataagggcttgcgggttctttatacgt

SEQ ID NO: 32200 - DNA, 109 bp, Unknown; identical to SEQ ID NO: 32176
  Description of Unknown: RightRegion for integrase B6201 sequence

SEQ ID NO: 32201 - DNA, 260 bp, Unknown
  Description of Unknown: RightRegion for integrase B6202 sequence
cgaacccaggtactggcgctcgggcgctccgtgttcatcaggttttctcgggccgcctaagaagaaggggagaccccgcgaggagcctcccctttgttttggctattcgaccaccaaaacttggccggggtagatcacgttcgggttcgccagcccgttcgccttggccagcgtctggtagtccgtgccgtacgtggcggcgatgcccgagagcgtgtcgccgctcttgaccgtgtaggtcttcttggacgacgcgccga

SEQ ID NO: 32202 - DNA, 260 bp, Unknown
  Description of Unknown: RightRegion for integrase B6203 sequence
cgcattgatattgatggggaggatataaccattcactggctgttcgctcctgaaaactaaaaaaggcggggcctgcgccctgccttttcttattctttagccgttactgctgccgcctgggtcgcgtgacaaacaaacaatcacctcgacgtgctttgtccttgggaacaaatccacgggctgaaccttttccagcgtatacccctgttcacacaggaacttagcatcgcgggcggcggtggaggggttgcagctgacca

SEQ ID NO: 32203 - DNA, 109 bp, Unknown
  Description of Unknown: RightRegion for integrase B6204 sequence
tacaacaaagaaaaggacacccttgaagtgtattactactacaagccgcaaacccagtaaatacaagggttttcgggtgtttgtaggttcttacaaaaaggtcaaccag

SEQ ID NO: 32204 - DNA, 260 bp, Unknown
  Description of Unknown: RightRegion for integrase B6205 sequence
cacatcgtattcgacaggaagaacacaagtcttgatgtgttcttaaagcttgtaatttagcggtttctatctgttatagggtattgcagtaccgaccgccatataccaatagcctacaatataaatgggaaggaactgttccgttttgttccttcctattctaccgtaaaacccatcatatttctacacaaaattatagcttgtccaaaaactctttcttccacttcttatcgtcggtccagtatgccgggcaaggcttt

SEQ ID NO: 32205 - DNA, 109 bp, Unknown
  Description of Unknown: RightRegion for integrase B6206 sequence
aagattatttatgataaagagtcagattctttgaaaatttatttttttctatgtcgttaagaatgcccgcaaacccagtaaaatcaagggtttgcgggcactttatacg

SEQ ID NO: 32206 - DNA, 260 bp, Unknown
  Description of Unknown: RightRegion for integrase B6207 sequence
aaaattatctacgatcgcaagaacgattctcttaaaatctactttttcctatacaggtaaaatacccgcaagcccagtaaaatcaagggtttgcgggtactttataggttatgacaatttggttgacccaatggggatccaaatccttaggcgaccagggctattcccctatcgaaattctccgttactactacggtgacgacatgtacattaacaccgccgaagccatctccggcatcccatcctcctggcctggctat

SEQ ID NO: 32207 - DNA, 109 bp, Unknown
  Description of Unknown: RightRegion for integrase B6208 sequence
aagattatctacgatcgcaaaaacgattctctcaaaatctactttttcttatacaggtaaaatgcccgcaaacccagtaaaatcaagagtttgcgtgtactttataggt

SEQ ID NO: 32208 - DNA, 109 bp, Unknown
  Description of Unknown: RightRegion for integrase B6209 sequence
tatgatcgctcaaaagatgagctgaaagtttattactactatgcgccggaatctcagtaaaatcaagggatttcgcagttttgtaggttataacaaaaaggtcatccaa

SEQ ID NO: 32209 - DNA, 109 bp, Unknown
  Description of Unknown: RightRegion for integrase B6210 sequence
gccaaagatgcaagcaaagatgaattcattttagaggtgcatccaaaattaccaaaatagcacttaaacataagttatagacttgcttggaagtaactttcagctatag

SEQ ID NO: 32210 - DNA, 109 bp, Unknown
  Description of Unknown: RightRegion for integrase B6211 sequence
tatgatcgctcaaaagatgagctgaaagtttattactactatgcgccggaatcccagtaaaatcaagggttttcgcagttttgtaggttataacaaaaaggtcatccaa

SEQ ID NO: 32211 - DNA, 260 bp, Unknown
  Description of Unknown: RightRegion for integrase B6212 sequence
aagattatctacgatcgcaagaacgattctctcaaaatctactttttcttatacaggtaaaatgcccgcaaccccagtaaaatcaagggtttgcgggtactttataggttatgacaatttggttgacccaatggggatccaaatccttaggcgaccagggctattcccctatcgaaattctccgttactactacggtgacgacatgtacattaacaccgccgaagccatctccggcatcccatcctcctggcctggctat

SEQ ID NO: 32212 - DNA, 260 bp, Unknown
  Description of Unknown: RightRegion for integrase B6213 sequence
cacatcgtgtttgaccgcggaaacacaagtctcgatatgttcctaaagcttgtaatttagcgggtttcaaggcattatagggtattacaatacggtggtcccgatggcgaaatgggagcttccatgcgctatctggcccagcggttttcttttgcaaatccgcgaattgccggtgtacttactgacatcggaaccgaggaacttgctcacctcgaaatgattggtgcgattgtccgccagctgacacgcggactttccgc

SEQ ID NO: 32213 - DNA, 109 bp, Unknown
  Description of Unknown: RightRegion for integrase B6214 sequence
aagattatctacgatcgtaagaatgattctcttaaaatctacttttttctgtataaatgatatattttaaatatcccgcaagccaagtaaaatcaatggcttgcgggta

SEQ ID NO: 32214 - DNA, 109 bp, Unknown
  Description of Unknown: RightRegion for integrase B6215 sequence
aagattatctacgatcgcaagaacgattctctcaaaatctactttttcttatacaggtaaaatgcccgcaaacccagtaaaatcaagggtttgcgtgtactttataggt

SEQ ID NO: 32215 - DNA, 260 bp, Unknown
  Description of Unknown: RightRegion for integrase B6216 sequence
aagattatctacgatcgcaagaacaattctcttaaaatctactttttcttatacaggtaaagtacacgcaaacccagtaaaatcaagagcttgcgtgtactttataggttataacaatttggttgacccaatggggatccaaatccctaggcgaccagggctattcccctatcgaaattctccgttactactacggtgacgacatgtacattaacaccgccgaagccatctccggcatcccatcctcctggcctggctat

SEQ ID NO: 32216 - DNA, 260 bp, Unknown
  Description of Unknown: RightRegion for integrase B6217 sequence
aagattatctacgatcgtaagaatgattctcttaaaatctactttttcttatacaggtaaaatgcccgcaagcccagtaaaatcaagaacttgcgtgtactttataggttataacaatttggttgacacaatggggatccaaatcattaggcgatcagggctactcccctatcgaaatcctacgctattattatggtgatgatatgtacatcaacaccgccgaagccatctccggcattccgtcctcctggcctggttat

SEQ ID NO: 32217 - DNA, 109 bp, Unknown; identical to SEQ ID NO: 32210
  Description of Unknown: RightRegion for integrase B6218 sequence

SEQ ID NO: 32218 - DNA, 260 bp, Unknown
  Description of Unknown: RightRegion for integrase B6219 sequence
aagattatctacgatcgcaagaacgattctcttaaaatctactttttcttataccggtaaaatacccgcaagccaagtaaaatcaagggtttgcgggtactttataggttatgacaatttggttgacccaatggggatccaaatccttaggcgaccagggctattcccctatcgaaattctccgttactactacggtgacgacatgtacattaacaccgccgaagccatctccggcatcccatcctcctggcctggctat

SEQ ID NO: 32219 - DNA, 260 bp, Unknown
  Description of Unknown: RightRegion for integrase B6220 sequence
aagattatctacgatcgcaagaacgattctcttaaaatctactttttcctatacaggtaaaatacccgcaagcccagtaaaatcaggggtttgcgggtactttataggttatgacaatttggttgacccaatggggatccaaatccttaggcgaccagggctattcccctatcgaaattctccgttactactacggtgacgacatgtacattaacaccgccgaagccatctccggcatcccatcctcctggcctggctat

SEQ ID NO: 32220 - DNA, 260 bp, Unknown
  Description of Unknown: RightRegion for integrase B6221 sequence
aagattatttatgataaagagtcagattctttgaaaatttatttttttctatgtcgttaagaatgcccgcaaacccttgattttactgggtttgcgggcactttatacgttattgaagttcggtggaccggatggagaattaggagcttctttgagatatttttctcagagatataccatgccttataatgaagtaattggcacactaacagacattgctaccgaagaatttgcccatatggaaatcgtatgcgccattg

SEQ ID NO: 32221 - DNA, 260 bp, Unknown
  Description of Unknown: RightRegion for integrase B6222 sequence
tatgatcgctcaaaagatgagctgaaagtttattactactatgcgccggaatctcagtaaaatcaagggatttcgcagttttgtaggttataacaaaaaggtcatccaattcggacagctcaccattttcccgtcacaatactgtgtcaatatcggctgccgcacgttcggtcttgaaagataatttgcaaacaattcatctacgatcacggaaatgctttcatatacatttctttccggtatccacttatgatcgaatg

SEQ ID NO: 32222 - DNA, 260 bp, Unknown
  Description of Unknown: RightRegion for integrase B6223 sequence
aagattatctacgatcgtaagaatgattctcttaaaatctactttttcttatacaggtaaaatgcctgcaaacccagtaagatcaagagtttgcgtgtactttataggttatgacaatttggttgacccaatggggatccaaatccttaggcgaccagggctattcccctatcgaaattctccgttactactacggtgacgacatgtacattaacaccgccgaagccatctccggcatcccatcctcctggcctggctat

SEQ ID NO: 32223 - DNA, 109 bp, Unknown; identical to SEQ ID NO: 32208
  Description of Unknown: RightRegion for integrase B6224 sequence

SEQ ID NO: 32224 - DNA, 260 bp, Unknown
  Description of Unknown: RightRegion for integrase B6225 sequence
gaaaagatgtgctaccggaagcaaagctccgatatgtcgctgcacatcgattttttatgactttatatgtacaagtacgatatagtgtcaagctgcaataccccgttcggatcaaaacacccaacgccagaacggcgaagtatattatttcacagcttggcggcccagacggagagttggctgcttcgctacggtatatgcaccagcgatacacggcaaaacctgacaaagtaaaaggagttttgacagatattgccaca

SEQ ID NO: 32225 - DNA, 260 bp, Unknown
  Description of Unknown: RightRegion for integrase B6226 sequence
aaacttttagtaaaacacgtttggctcggatcaggtaaggtagaaattgaatggaagtaggcttcttagcctacttttatttttgtttctaatgtttcagtattagaaataaaaagaaaggaatttttaaatatttcaaaaaagttcttgattttagcgttacgctatgatacaattatatcataaaagaggtgatgaagtggatgatgtacgggacatacttaaagccgtactggcaatggtactgtttgaagtaataa

SEQ ID NO: 32226 - DNA, 260 bp, Unknown
  Description of Unknown: RightRegion for integrase B6227 sequence
aagattatttatgataaagagtcagattctttgaaaatttatttttttctatgtcgttaagaatgcccgcaaacccagtaaaatcaagggtttgcgggcactttatacgttattgaagtttggtggaccggatggagaattaggagcttctttgagatatttttctcagagatataccatgccttataatgaagtaattggcacactaacagacattgctaccgaagaatttgcccatatggaaatcgtatgcgccattg

SEQ ID NO: 32227 - DNA, 109 bp, Unknown
  Description of Unknown: RightRegion for integrase B6228 sequence
aaaattatctacgatcgcaagaacgattctcttaaaatctactttttcctatacaggtaaaatacccgcaagcccagtaaaatcaaaggtttgcgggtactttataggt

SEQ ID NO: 32228 - DNA, 109 bp, Unknown
  Description of Unknown: RightRegion for integrase B6229 sequence
cacatcgtattcgacaggaagaacacaagtcttgatgtgttcttaaagcttgtaatttagcggtttctatccgttatagggtattgcagtaccgacctccatactggct

SEQ ID NO: 32229 - DNA, 109 bp, Unknown
  Description of Unknown: RightRegion for integrase B6230 sequence
aaaattatctatgatcgtaagaatgattctcttaaaatctactttttcttatacaggtaaaatgcccgcaaacccagtaaaaatcaagagcttgcgtgtactttatagg

SEQ ID NO: 32230 - DNA, 260 bp, Unknown
  Description of Unknown: RightRegion for integrase B6231 sequence
aagattatctacgatcgcaagaacgattctcttaaaatctactttttcttatacaggtaaaatgcccgcaaacccagtaaaatcaagggtttgcgtatactttataggttataacaatttggttgacccaatggggatccaaatccttaggcgaccagggctattcccctatcgaaattctccgttactactacggtgacgacatgtacattaacaccgccgaagccatctccggcatcccatcctcctggcctggctat

SEQ ID NO: 32231 - DNA, 260 bp, Unknown
  Description of Unknown: RightRegion for integrase B6232 sequence
aagattatctacgatcgcaagaacgattctcttaaaatctactttttcttatacaggtaaaatgcccgcaaacccagtaaaatcaagggtttgcgtatactttataggttataacaatttggttgacctttttgctataacctataaagtggatttttacctatttatatgctacattttagcaaaaatcatctaaattgaatagcctcgattctaagttcctgtcctacagttccaagagtagctactccatcggctct

SEQ ID NO: 32232 - DNA, 260 bp, Unknown
  Description of Unknown: RightRegion for integrase B6233 sequence
cacatcgtgtttgaccgcggaaatacaagtctcgatatgttcctaaagcttgtaatttagcgggtttcaaggcattatagggtattacgatacggtggtcccgatggcgaaatgggagcttccatgcgctatctggcccagcggttttcttttgcaaatccgcggattgccggtgtacttactgacatcggaaccgaggaacttggtcacctcgaaatgattggtgcgattgtccgccagctgacacgcggactttccgc

SEQ ID NO: 32233 - DNA, 260 bp, Unknown
  Description of Unknown: RightRegion for integrase B6234 sequence
aagatcatttatgataaagagtcagattctttgaaaatttatttttttctatgtcgttaagaatgcccgcaaacccagtaaaatcaatggtttgcgggcactttatacgttattgaagttcggtggaccggatggagaattaggagcttctttgagatatttttctcagagatataccatgccttataatgaagtaattggcacactaacagacattgctaccgaagaatttgcccatatggaaatcgtatgcgccattg

SEQ ID NO: 32234 - DNA, 260 bp, Unknown
  Description of Unknown: RightRegion for integrase B6235 sequence
aagattatctacgatcgcaagaacgattctctcaaaatctactttttcttatacaggtaaaatgcccgcaagcccagcaaaatcaagggtttacgtgtactttataggttataacaatttggttgacccaatggggatccaaatccttaggcgaccagggctattcccctatcgaaattctccgttactactacggtgacgacatgtacattaacaccgccgaagccatctccggcatcccatcctcctggcctggctat

SEQ ID NO: 32235 - DNA, 260 bp, Unknown
  Description of Unknown: RightRegion for integrase B6236 sequence
aagattatctatgatcgcaagaacgattctctcaaaatctactttttcttatacaggtaaaatacccgcaaacccttgattttacttggcttgcgggtactttataggttatgacaatttggttgacccaatggggatccaaatccttaggcgaccagggctattcccctatcgaaattctccgttactactacggtgacgacatgtacattaacaccgccgaagccatctccggcatcccatcctcctggcctggctat

SEQ ID NO: 32236 - DNA, 109 bp, Unknown; identical to SEQ ID NO: 32228
  Description of Unknown: RightRegion for integrase B6237 sequence

SEQ ID NO: 32237 - DNA, 109 bp, Unknown
  Description of Unknown: RightRegion for integrase B6238 sequence
aagattatatatgataaagagtcagattctttgaaaatttatttttttctatgtcgttaagaatgcccgcaaacccagtaaaatcaagggtttgcgggcactttatatg

SEQ ID NO: 32238 - DNA, 109 bp, Unknown
  Description of Unknown: RightRegion for integrase B6239 sequence
acacctaatccagtagaggttaggtgttcgtccaattatcaaatggtgaccccggagtgattcgaacactcgacacacggcttagaaggccgttgctctatccagctga

SEQ ID NO: 32239 - DNA, 260 bp, Unknown
  Description of Unknown: RightRegion for integrase B6240 sequence
cacatcgtgtttgaccgcggaaatacaagtctcgatatgttcttaaagcttgtaatttagcgggtttcaaggcattatagggtattacgatacggtggtcccgatggcgaaatgggagcttccatgcgctatctggcccagcggttttcttttgcaaatccgcggattgccggtgtacttactgacatcggaaccgaggaacttgctcacctcgaaatgattggtgcgattgtccgccagctgacacgcggactttccgc

SEQ ID NO: 32240 - DNA, 260 bp, Unknown
  Description of Unknown: RightRegion for integrase B6241 sequence
aagattatctacgatcgcaagaacgattctcttaaaatctactttttcctatacaggtaaaatgcccgcaagcccagtaaaatcaagggtttgcgggtgctttataggtggtgacaatttggttgacccaatggggatccaaatccttaggcgaccagggctattcccctatcgaaattctccgttactactacggtgacgacatgtacattaacaccgccgaagccatctccggcatcccatcctcctggcctggctat

SEQ ID NO: 32241 - DNA, 260 bp, Unknown
  Description of Unknown: RightRegion for integrase B6242 sequence
tcagccgtgtcagatagctcctcagcggattgtgctccctctgcgctggggagccaataacgcataatccgaacactttcgttactaagaatgtgttcggatttgttatttatttttgatattgtagccgtccgaattttatgagtttgatatgtacccagaatcctggacacaataaaatagcttaacccatggatgctatcctgtataaaacaggaggcatccattttgttttagcctgtattctaacattgttgtat

SEQ ID NO: 32242 - DNA, 260 bp, Unknown
  Description of Unknown: RightRegion for integrase B6243 sequence
cacatcgtgtttgaccgcggaaacacaagtctcgatatgttcctaaagcttgtaatttagctggtttcaaggcattatagggtattacaatacggtggtcccgatggcgaaatgggagcttccatgcgctatctggcccagcggttttcttttgcaaatccgcggattgccggtgtacttactgacatcggaaccgaggaacttggtcacctcgaaatgattggtgcgattgtccgccagctgacacgcggactttccgc

SEQ ID NO: 32243 - DNA, 260 bp, Unknown
  Description of Unknown: RightRegion for integrase B6244 sequence
aagattatctacgatcgcaagaacgattctctcaaaatctactttttcttatacaggtaaaatacccgcaagccaagtaaaatcaaaggtttgcgggtactttataggttatgacaatttggttgacccaatggggatccaaatccttaggcgaccagggctattcccctatcgaaattctccgttactactacggtgacgacatgtacattaacaccgccgaagccatctccggcatcccatcctcctggcctggctat

SEQ ID NO: 32244 - DNA, 109 bp, Unknown
  Description of Unknown: RightRegion for integrase B6245 sequence
aagattgtctacgatcgtaagaatgattctcttaaaatctactttttcctatacaggtaaaatgcccgcaagcccagtaaaatcaagagcttgcgtgtactttataggt

SEQ ID NO: 32245 - DNA, 260 bp, Unknown
  Description of Unknown: RightRegion for integrase B6246 sequence
aagattatttatgataaagagtcagattctttgaaaatttatttttttctatgtcgttaagaatgcccgcaaacccttgattttactgggtttgcgggcactttatacgttattgaagttcggtggaccggatggagaattaggagcttctttgagatatttttctcagagatataccatgccttataatgaagtaattggcacactaacagacattgctaccgaggaatttgcccatatggaaatcgtatgcgccattg

SEQ ID NO: 32246 - DNA, 109 bp, Unknown
  Description of Unknown: RightRegion for integrase B6247 sequence
aagattatctacgatcgcaaaaacgattctctcaaaatctactttttcttatacaggtaaaatgcctgcaaacccagtaaaatcaaaagtttgcgtgtactttataggt

SEQ ID NO: 32247 - DNA, 260 bp, Unknown
  Description of Unknown: RightRegion for integrase B6248 sequence
gatcttgatggtgaaaacatagacattcattggagctttgctcctgggaaatcggaataaataaaggccgcccagcatggacggccttttcgcataatttgcggaatcgctgaatttacgcgcggttttcgctgacttttcgcaaaatgcgcggataacgcgattttgttgacgtcgccaaaatcgggatgttttcgcggcgtcacgaaaacatggagcggttacgggtctacccgtgtataacaaacgcaagcctccac

SEQ ID NO: 32248 - DNA, 260 bp, Unknown
  Description of Unknown: RightRegion for integrase B6249 sequence
aagattatctacgatcgcaagaacgattctctcaaaatctactttttcttatacaggtaaaatgcccgcaagcccagtaaaatcaagggtttgcgggtgctttataggttgtgacaatttggttgacccaatggggatccaaatccttaggcgaccagggctattcccctatcgaaattctccgttactactacggtgacgacatgtacattaacaccgccgaagccatctccggcatcccatcctcctggcctggctat

SEQ ID NO: 32249 - DNA, 109 bp, Unknown
  Description of Unknown: RightRegion for integrase B6250 sequence
aagattatctacgatcgcaagaacgattctctcaaaatctactttttcttatacaggtaaaatgcccgcaaacccagtaaaaccaagggtttgcgggtactttataggt

SEQ ID NO: 32250 - DNA, 260 bp, Unknown
  Description of Unknown: RightRegion for integrase B6251 sequence
tcagccgtgtcagatacctcctcagcggattgtgctccctctgcgctggggagccaataacgcataatccgaacactttcgttactaagaatgtgttcggatttgttatttatttttgatattgtagccgtccgaattttatgagtttgatatgtacccagaatcctggacacaataaaatagcttaacccatggatgctatcctgtataaaacaggaggcatccattttgttttagcctgtattctaacattgttgtat

SEQ ID NO: 32251 - DNA, 260 bp, Unknown
  Description of Unknown: RightRegion for integrase B6252 sequence
aagatcatttatgataaagagtcggattctttgaaaatttatttttttctatgtcgttaagaatgcccgcaaacccagtaaaaaatcaagggtttacgggcactttatacgttattgaagttcggtggaccggatggagaattaggagcttctttgagatatttttctcagagatataccatgccttataatgaagtaattggcacactaacagacattgctaccgaagaatttgcccatatggaaatcgtatgcgccat

SEQ ID NO: 32252 - DNA, 260 bp, Unknown
  Description of Unknown: RightRegion for integrase B6253 sequence
aagattatctacgatcgcaagaacgattctctcaaaatctactttttcttatacaggtaaaatgcccgcaaacccagtaaaatcaagagtttgcgtgtactttataggttataacaatttggttgacccaatggggatccaaatccttaggcgaccagggctattcccctatcgaaattctccgttactactacggtgacgacatgtacattaacaccgccgaagccatctccggcatcccatcctcctggcctggctat

SEQ ID NO: 32253 - DNA, 109 bp, Unknown; identical to SEQ ID NO: 32205
  Description of Unknown: RightRegion for integrase B6254 sequence

SEQ ID NO: 32254 - DNA, 260 bp, Unknown
  Description of Unknown: RightRegion for integrase B6255 sequence
cacatcgtgtttgaccgcggaaacacaagtctcgatatgttcctaaagcttgtaatttagcgggtttcaaggaattatagggtattacgatacggtggtcccgatggcgaaatgggagcttccatgcgctatctggcccagcggttttcttttgcaaatccgcggattgccggtgtacttactgacatcggaaccgaggaacttgctcacctcgaaatgattggtgcgattgtccgccagctaacacgcggactttccgc

SEQ ID NO: 32255 - DNA, 260 bp, Unknown
  Description of Unknown: RightRegion for integrase B6256 sequence
cacatcgtgtttgaccgcggaaacacaagtctcgatatgttcctaaagcttgtaatttagcgggtttcaaggaattatagggtattacgatacggtggtcccgatggcgaaatgggagcttccatgcgctatctggcccagcggttttcttttgcaaatccgcggattgccggtgtacttactgacatcggaaccgaggaacttggtcacctcgaaatgattggtgcgattgtccgccagctgacacgcggactttccgc

SEQ ID NO: 32256 - DNA, 109 bp, Unknown
  Description of Unknown: RightRegion for integrase B6257 sequence
aagattatctacgatcgcaagaacgattctctcaaaatctactttttcttatacaggtaaaatgcccgcaaacccagtaaaaccaatggtttgcgggtactttataggt

SEQ ID NO: 32257 - DNA, 109 bp, Unknown
  Description of Unknown: RightRegion for integrase B6258 sequence
aagattatctacgatcgcaagaacgattctcttaaaatctactttttcctatacaggtaaaatgcccgcaagcccagtaaaatcaagggtttgcgggtgctttacaggt

SEQ ID NO: 32258 - DNA, 102 bp, Unknown
  Description of Unknown: RightRegion for integrase B6259 sequence
cacatcgtattcgacaggaagaacacaagtcttgatgtgttcttaaagcttgtaatttagcggtttctatccgttatagggtattgcagtaccgaccgccat

SEQ ID NO: 32259 - DNA, 136 bp, Unknown
  Description of Unknown: RightRegion for integrase B6260 sequence
aagattatctacgatcgcaagaacgattctcttaaaatctactttttcttataccggtaaaatacccgcaagccaagtaaaatggtgtgctacccgtcaagtagacaaattaaataacgaaaattttttcttcccc

SEQ ID NO: 32260 - DNA, 260 bp, Unknown
  Description of Unknown: RightRegion for integrase B6261 sequence
cacatcgtgtttgaccgcggaaacacaagtctcgatatgttcttaaagcttgtaatttagcgggtttcaaggaattttatagggtattacgatacggtggtcccgatggcgaaatgggagcttccatgcgctatctggcccagcggttttcttttgcaaatccgcggattgccggtgtacttactgacatcggaaccgaggaacttgctcacctcgaaatgattggcgcgattgttcgccagctgacgcgcggactttcc

SEQ ID NO: 32261 - DNA, 109 bp, Unknown
  Description of Unknown: RightRegion for integrase B6262 sequence
aaaattatctacgatcgcaagaacaattctcttaaaatctactttttcttatacaggtaaaatgcccgcaaacccagtaaatgtgagggtttggtaaggatgtttttaa

SEQ ID NO: 32262 - DNA, 260 bp, Unknown
  Description of Unknown: RightRegion for integrase B6263 sequence
attctcatatcccacattgatgcaaccagtgagagcgttacaatccactggaaaatctaaagcctgtttcacttggcattatgcctttgtaaaaaatagtttctgatcttccagcaacacagccctctgccgttccagctgacgcagttggtctccaatgcccagttcatccatccggcaggccatcgccgccgtgctgtccccaggcgttccaccacggggcattccatcggtgcccattccccgcatagggtccactt

SEQ ID NO: 32263 - DNA, 260 bp, Unknown
  Description of Unknown: RightRegion for integrase B6264 sequence
aagattatctacgatcgcaagaacgattctcttaaaatctactttttcttatacaggtaaaatgcccgcaaacccagtaaaatcaagggtttgcgggtactttataggttataacaatttggttgacccaatggggatccaaatccttaggcgaccagggctattcccctatcgaaattctccgttactactacggtgacgacatgtacattaacaccgccgaagccatctccggcatcccatcctcctggcctggctat

SEQ ID NO: 32264 - DNA, 260 bp, Unknown
  Description of Unknown: RightRegion for integrase B6265 sequence
ttgaccgctgactcagcggaggaaaaaagttcggatttgtccagctctgctggaccataagtccaacgatttcacgttagaaatcgttggacttttttgtttataggctggcctcatttggctttgaccacaattttgaccacaatgccaaagattttatctggtcaatcgcaggggcaagtgggcttttttgacgcaacatcatctgctgcgatatgcgagccagcgttgatgccaacgatttgaaaagctggctcgcg

SEQ ID NO: 32265 - DNA, 260 bp, Unknown
  Description of Unknown: RightRegion for integrase B6266 sequence
aagattatctacgatcgcaagaacgattctctcaaaatctactttttcttatacaggtaaaatgcccgcaaacccagtaaaaccaaggggttgcgggtactttataggttgtgacaatttggatgacacaatggggatccaaatcattaggcgatcagggctactcccctatcgaaatcctacgctattattatggtgatgacatgtacatcaacaccgccgaagccatctccggcattccgtcctcctggcctggttat

SEQ ID NO: 32266 - DNA, 109 bp, Unknown
  Description of Unknown: RightRegion for integrase B6267 sequence
aagattatctacgatcgcaagaacgattctcttaaaatctactttttcctatacaggtaaaatgcccgcaagcccagtaaaatcaagggtttgcgtatactttataggt

SEQ ID NO: 32267 - DNA, 260 bp, Unknown
  Description of Unknown: RightRegion for integrase B6268 sequence
gatcttgatggtgaaaacatagacattcattggagctttgctcctggggaatcggaataaataaaggccgcccagcatggacggccttttcgcttaatttgcggaatcgctgaatttacgcgcggttttcgctgacttttcgcaaaatgcgcggataacgcgattttgttgacgtcgccaaaatcggaatgttttcgcggcgtcacgaaaacatgggggcggttacgggtctacccgtgtataacaaacgcaagcctcca

SEQ ID NO: 32268 - DNA, 260 bp, Unknown
  Description of Unknown: RightRegion for integrase B6269 sequence
aaaattatctacgatcgcaagaacgattctcttaaaatctactttttcttatacaggtaaaatgcccgcaaacccagtaaaaccaagggtttgcgggtgctttataggttgtgacaatttggttgacccaatggggatccaaatccttaggcgaccagggctattcccctatcgaaattctccgttactactacggtgacgacatgtacattaacaccgccgaagccatctccggcatcccatcctcctggcctggctat

SEQ ID NO: 32269 - DNA, 260 bp, Unknown
  Description of Unknown: RightRegion for integrase B6270 sequence
cacatcgtgtttgaccgcggaaacacaagtctcgatatgttcctaaagcttgtaatttagtgggtttcaaggcattatagggtattacgatacggtggtcccgatggcgaaatgggagcttccatgcgctatctggcccagcggttttcttttgcaaatccgcggattgccggtgtacttactgacatcggaaccgaggaacttgctcacctcgaaatgattggtgcgattgtccgccagctgacacgcggactttccgc

SEQ ID NO: 32270 - DNA, 109 bp, Unknown
  Description of Unknown: RightRegion for integrase B6271 sequence
cacatcgtgttcgatcgtaagaatacaagccttgatgtgttcctaaagcttgtagtttagcgttttctgaccgttatagggtattgcagtaccgaccgccatactgact

SEQ ID NO: 32271 - DNA, 260 bp, Unknown; identical to SEQ ID NO: 32221
  Description of Unknown: RightRegion for integrase B6272 sequence

SEQ ID NO: 32272 - DNA, 260 bp, Unknown; identical to SEQ ID NO: 32263
  Description of Unknown: RightRegion for integrase B6273 sequence

SEQ ID NO: 32273 - DNA, 260 bp, Unknown
  Description of Unknown: RightRegion for integrase B6274 sequence
aagattatctacgatcgcaagaacgattctcttaaaatctactttttcttatacaggtaaaatacccgcaagccaagtaaaatcaagggtttgcgggtactttataggttataacaatttggttgacccaatggggatccaaatccttaggcgaccagggctattcccctatcgaaattctccgttactactacggtgacgacatgtacattaacaccgccgaagccatctccggcatcccatcctcctggcctggctat

SEQ ID NO: 32274 - DNA, 109 bp, Unknown; identical to SEQ ID NO: 32210
  Description of Unknown: RightRegion for integrase B6275 sequence

SEQ ID NO: 32275 - DNA, 260 bp, Unknown
  Description of Unknown: RightRegion for integrase B6276 sequence
aagattatctacgatcgcaagaacgattctcttaaaatctactttttcctatacaggtaaaatacccgcaagcccagtaaaatcaaaggtttgcgggtactttataggttatgacaatttggttgacccaatggggatccaaatccttaggcgaccagggctattcccctatcgaaattctccgttactactacggtgacgacatgtacattaacaccgccgaagccatctccggcatcccatcctcctggcctggctat

SEQ ID NO: 32276 - DNA, 260 bp, Unknown
  Description of Unknown: RightRegion for integrase B6277 sequence
cacatcgtgtttgaccgcggaaatacaagtctcgatatgttcctaaagcttgtaatttagcgggtttcaaggcattatagggtattacagtacggtggtcccgatggcgaaatgggagcttccatgcgctatctggcccagcggttttcttttgcaaatccgcggattgccggtgtacttactgacatcggaaccgaggaacttgctcacctcgaaatgattggtgcgattgtccgccagctgacacgcggactttccgc

SEQ ID NO: 32277 - DNA, 109 bp, Unknown
  Description of Unknown: RightRegion for integrase B6278 sequence
aagatcatttatgataaagagtcggattctttgaaaatttatttttttctatgtcgttaagaatgcccgcaaacccagtaaaatgatatgctccccatatggtagacaa

SEQ ID NO: 32278 - DNA, 260 bp, Unknown
  Description of Unknown: RightRegion for integrase B6279 sequence
cacatcgtgtttgaccgcggaaacacaagtctcgatatgttcctaaagcttgtaatttagtgggtttcaaggcattatagggtattacgatacggtggtcccgatggcgaaatgggagcttccatgcgctatctggcccagcggttttcttttgcaaatccgcggattgccggtgtacttactgacatcggaaccgaggaacttgctcacctcgaaatgattggtgcgattgttcgccagctgacacgcggactttccgc

SEQ ID NO: 32279 - DNA, 260 bp, Unknown
  Description of Unknown: RightRegion for integrase B6280 sequence
aagattatctatgatcgtaagaatgattctcttaaaatctactttttcttatacaggtaaaatgcccgcaagcccagtaaaatcaagagcttgcgtgtactttataggttatgacaatttggttgacacaatggggatccaaatcattaggcgatcagggctactcccctatcgaaatcctacgctattattatggtgatgacatgtacatcaacaccgccgaagccatctccggcattccgtcctcctggcctggttat

SEQ ID NO: 32280 - DNA, 260 bp, Unknown
  Description of Unknown: RightRegion for integrase B6281 sequence
cacatcgtgtttgaccgcggaaacacaagtctcgatatgttcctaaagcttgtaatttagcgggtttcaaggcattatagggtattacaatacggtggtcccgatggcgaaatgggagcttccatgcgctatctggcccagcggttttcttttgcaaatccgcggattgccggtgtacttactgacatcggaaccgaggaacttgctcacctcgaaatgattggtgcgattgtccgccagctgacacgcggactttccgc

SEQ ID NO: 32281 - DNA, 260 bp, Unknown
  Description of Unknown: RightRegion for integrase B6282 sequence
agccctgcctacaaatactcattcgaactaatgatattatcgagtgagattaacctctgattttcagaggtttttttgtatttatacataaaaaagaagccaggcattgcacctggctttactctattctttaggttttgtatatgtcaatgcttgttcactgtctgcaactccacttgtagttggatccgtcactgcattgaatacactgactacaactaatccaagaacataaggattactcaatgcacccattagta

SEQ ID NO: 32282 - DNA, 109 bp, Unknown; identical to SEQ ID NO: 32213
  Description of Unknown: RightRegion for integrase B6283 sequence

SEQ ID NO: 32283 - DNA, 260 bp, Unknown
  Description of Unknown: RightRegion for integrase B6284 sequence
aagattatctacgatcgtaagaatgattctcttaaaatctactttttcttatacaggtaaaatgcccgcaagcccagtaaaatcaagaacttgcgtgtactttataggttataacaatttggttgacccaatggggatccaaatccttaggcgaccagggctattcccctatcgaaattctccgttactactacggtgacgacatgtacattaacaccgccgaagccatctccggcatcccatcctcctggcctggctat

SEQ ID NO: 32284 - DNA, 260 bp, Unknown
  Description of Unknown: RightRegion for integrase B6285 sequence
gatcttgatggtgaaaacatagacattcattggagctttgctcctggggaatcggaataaataaaggccgcccatgctgggcggccttttcgcttaatttgcggaatcactgaatttacgcgcggttttcgctgacttttcgcaaaatgcgcggataacgcgattttgttgacgtcgccaaaatcgggatgttttcgcggcgtcacgaaaacatggagcggttacgggtccacccgtgtataacaaacgcaagcctccac

SEQ ID NO: 32285 - DNA, 109 bp, Unknown
  Description of Unknown: RightRegion for integrase B6286 sequence
aaaattatctacgatcgcaagaacgattctctcaaaatctactttttcttatacaggtaaaatacccgcaagccaagtaaaatcaagggtttgcgggtactttataggt

SEQ ID NO: 32286 - DNA, 109 bp, Unknown; identical to SEQ ID NO: 32208
  Description of Unknown: RightRegion for integrase B6287 sequence

SEQ ID NO: 32287 - DNA, 260 bp, Unknown
  Description of Unknown: RightRegion for integrase B6288 sequence
aagattatctatgatcgcaagaacgattctctcaaaatctactttttcttatacaggtaaaatacccgcaaacccttgattttacttggcttgcgggtactttataggttatgacaatttggttgacacaatggggttccaaatcattaggcgatcagggctactcccctatcgaaatcctgcgctattattatggtgatgacatgtacatcaacaccgccgaagccatctccggcattccgtcctcctggcctggttat

SEQ ID NO: 32288 - DNA, 260 bp, Unknown
  Description of Unknown: RightRegion for integrase B6289 sequence
gccgccaaagatgccccagaaggcaatggttcggatttgggttgcttcgctccaccatgaaaaaagaacgccatttcgttaggaattggcgttcttttctttgtcatggtaacgtttttggtaacactattaagttttcagactgctctcaccagtgcattatacaacatctcaatgaactgcaccgcgctgggcgcaccggtcagcggatagcctgccagctgctgcacatactccgggtttgtgagccatgcaccttt

SEQ ID NO: 32289 - DNA, 260 bp, Unknown
  Description of Unknown: RightRegion for integrase B6290 sequence
cgaaccgaggtgtgcgccgtcggcacagtcatcttcgttaggataccacgagcggcctaggagacaaccaggcgcatgccgggatagatcaggttcgggtttgagataccgttcttggcggcgagatcctggtaggtcgtgccgtacttggaggcgatgccggaaagggtgtcgccgctctggacaacgtagacctgctcggtagtggcctgcccgttgatgatcgccataacctcgtcgtagcgcggccccagtacggc

SEQ ID NO: 32290 - DNA, 260 bp, Unknown
  Description of Unknown: RightRegion for integrase B6291 sequence
gaaattatatataacaagaaagaaaattcacttataataacttttaacgaattatcataaaaagcaagtcgtatgacctgcttttattattatttttaacacttacaccaaataggattaacatcaatgatgtctggatgcattttttcttctatgattttagcagcttccacaaaagaatttatatcacttccaaatatttgctgactaattggtctttcatcatcattcattttaagtagttcaaaagtcttttcatt

SEQ ID NO: 32291 - DNA, 260 bp, Unknown
  Description of Unknown: RightRegion for integrase B6292 sequence
cacatcgtgtttgaccgcggaaacacaagtctcgatatgttcctaaagcttgtaatttagcgggtttcaaggcattatagggtattacaatacggtggtcccgatggcgaaatgggagcttccatgcgttatctggcccagcggttttcttttgcaaatccgcggattgccggtgtacttactgacattggaaccgaggaacttgctcacctcgaaatgattggtgcgattgtccgccagctgacacgcggactttccgc

SEQ ID NO: 32292 - DNA, 260 bp, Unknown
  Description of Unknown: RightRegion for integrase B6293 sequence
cgaacccaggtattggccctcggtcgttccgtgttcatcaggttttctcgggccgcctaaaatagcaactactgaaaaaggggaggccccgcgaggagcctcccctttgttttggctatcccaccaccagcacttggccggggtagatcacgttcgggttcgccaatccgttcgccttggccagcgtccggtagtccgtgccgtacttggcggcgatgcccgagagcgtgtcgccgctcttgaccgtgtaggtcttcttg

SEQ ID NO: 32293 - DNA, 260 bp, Unknown
  Description of Unknown: RightRegion for integrase B6294 sequence
cacatcgtgtttgaccgcggaaacacaagtctcgatatgttcctaaagcttgtaatttagcgggtttcaaggcattatagggtattacaatacggtggtcccgatggcgaaatgggtgcttccatgcgctatctggcccagcggttttcttttgcaaatccgcggattgccggtgtacttaccgacatcggaaccgaggaacttgctcacctcgaaatgattggtgcgattgttcgccagctgacgcgcggactttccgc

SEQ ID NO: 32294 - DNA, 109 bp, Unknown
  Description of Unknown: RightRegion for integrase B6295 sequence
aaaattatctacgatcgcaagaacgattctcttaaaatcttctttttcctatacaggtaaaatacccgcaagcccagtaaaatcaaaggtttgcgggcactttataggt

SEQ ID NO: 32295 - DNA, 260 bp, Unknown; identical to SEQ ID NO: 32206
  Description of Unknown: RightRegion for integrase B6296 sequence

SEQ ID NO: 32296 - DNA, 260 bp, Unknown
  Description of Unknown: RightRegion for integrase B6297 sequence
aagattatctacgatcgcaaaaacgattctctcaaaatctactttttcttatacaggtaaaatgcccgcaaacccagtaaaatcaagagtttgcgtgtactttataggttatgacaatttggttgacccaatggggatccaaatccttaggcgaccagggctattcccctatcgaaattctccgttactactacggtgacgacatgtacattaacaccgccgaagccatctccggcatcccatcctcctggcctggctat

SEQ ID NO: 32297 - DNA, 109 bp, Unknown
  Description of Unknown: RightRegion for integrase B6298 sequence
aagattatatatgataaagagtcagattctttgaaaatttatttttttctatgtcgttaagaatgcccgcaaccccagtaaaatcaatggtttgcgggcactttatacg

SEQ ID NO: 32298 - DNA, 260 bp, Unknown
  Description of Unknown: RightRegion for integrase B6299 sequence
aagattatctacgatcgcaagaacgattctcttaaaatctactttttcctatacaggtaaaatacccgcaatcccagtaaaatcaagggtttgcgggtactttataggttataacaatttggttgacccaatggggatccaaatccttaggcgaccagggctattcccctatcgaaattctccgttactactacggtgacgacatgtacattaacaccgccgaagccatctccggcatcccatcctcctggcctggctat

SEQ ID NO: 32299 - DNA, 260 bp, Unknown
  Description of Unknown: RightRegion for integrase B6300 sequence
tatgatcgctcaaaagatgagctgaaagtttattactactatgcgccggaatcccagtaaaatcaagggttttcgcagttttgtaggttataacaaaaaggtcaaccaattcggacagctcaccattttcccgtcacaatactgtgtcaatatcggctgccgcacgttcggtcttgaaagataatttgcaaacaattcatctacgatcacggaaatgctttcatatacatttctttccggtatccacttatgatcgaatg

SEQ ID NO: 32300 - DNA, 109 bp, Unknown
  Description of Unknown: RightRegion for integrase B6301 sequence
aagatcatttatgataaagagtcggattctttgaaaatttatttttttctatgtcgttaagaatgcccgcaaacccagtaaaatcaagggtttgcgggcactttatacg

SEQ ID NO: 32301 - DNA, 109 bp, Unknown
  Description of Unknown: RightRegion for integrase B6302 sequence
aagattatttatgataaagagtcagattctttgaaaatttatttttttctatgtcgttaagaatgcccgcaagcccttgattttactgggtttgcgggcactttatacg

SEQ ID NO: 32302 - DNA, 260 bp, Unknown
  Description of Unknown: RightRegion for integrase B6303 sequence
aagattatctacgatcgtaagaatgattctcttaaaatctactttttcttatacaggtaaaatgcccgcaagcccagtaaaatcaagggtttgcgggtgctttataggttgtgacaatttggttgacccaatggggatccaaatccttaggcgaccagggctattcccctatcgaaattctccgttactactacggtgacgacatgtacattaacaccgccgaagccatctccggcatcccatcctcctggcctggctat

SEQ ID NO: 32303 - DNA, 260 bp, Unknown; identical to SEQ ID NO: 32206
  Description of Unknown: RightRegion for integrase B6304 sequence

SEQ ID NO: 32304 - DNA, 109 bp, Unknown
  Description of Unknown: RightRegion for integrase B6305 sequence
attttaatagatagggtccttatttataacgaccaaataaccgtaaaatggaagtattgatatacttccattttgtttccaaagtatccacatcccactgtatagcata

SEQ ID NO: 32305 - DNA, 260 bp, Unknown
  Description of Unknown: RightRegion for integrase B6306 sequence
aagattatctacgatcgcaagaacgattctctcaaaatctactttttcttatacaggtaaaatgcccgcaaacccagtaaaaccaaaggtttgcgggtactttataggttgtgacaatttggttgacccaatggggatccaaatccttaggcgaccagggctattcccctatcgaaattctccgttactactacggtgacgacatgtacattaacaccgccgaagccatctccggcatcccatcctcctggcctggctat

SEQ ID NO: 32306 - DNA, 260 bp, Unknown
  Description of Unknown: RightRegion for integrase B6307 sequence
gatcttgatggtgaaaacatagacattcattggagctttgctcctggggaatcggaataaataaaggccgcccagcatgggcggccttttcgcttaatttgcggaatcactgaatttacgcgcggttttcgctgacttttcgctgacttttcgcaaaatgcgcggataacgcgattttgttgacgtcgccaaaatcgggatgttttcgcggcgtcacgaaaacatggagcggttacgggtccacccgtgtataacaaacg

SEQ ID NO: 32307 - DNA, 109 bp, Unknown
  Description of Unknown: RightRegion for integrase B6308 sequence
cacatcgtgttcaatcgtaagaatacaagccttgatgtgttcctaaagcttgtagtttagcggtttctgaccgttatagggtattgcagtaccgaccgccatactgact

SEQ ID NO: 32308 - DNA, 109 bp, Unknown; identical to SEQ ID NO: 32205
  Description of Unknown: RightRegion for integrase B6309 sequence

SEQ ID NO: 32309 - DNA, 260 bp, Unknown
  Description of Unknown: RightRegion for integrase B6310 sequence
aagattatctacgatcgcaagaacgattctctcaaaatctactttttcttatacaggtaaaatacccgcaagccaagtaaaatcaaaggtttgcgggtactttataggttatgacaatttggttgacccaatggggatccaaattcttaggcgaccagggctattcccctatcgaaattctccgttactactacggtgacgacatgtacattaacaccgccgaagccatctccggcatcccatcctcctggcctggctat

SEQ ID NO: 32310 - DNA, 109 bp, Unknown
  Description of Unknown: RightRegion for integrase B6311 sequence
aagattatctacgatcgtaagaatgattctcttaaaatctactttttcttatacaggtaaaatgcccgcaagcccagtaaaatcaagggtttgcgggtgctttataggt

SEQ ID NO: 32311 - DNA, 260 bp, Unknown
  Description of Unknown: RightRegion for integrase B6312 sequence
cacatcgtgttcgatcgtaagaatacaagccttgatgtgttcctaaagcttgtagtttagcggtttctgatcgttatatggtattgcagtaccgaccgccatactgacttatgatataagacgcaagcttcgcattcggcgtgctgattttaatcggatactgcaatcgtttttcataactccacatagatcatcttcccccttcccaaggcatcggaccttcgttccagttccattcgtcagcattactctccccaaac

SEQ ID NO: 32312 - DNA, 109 bp, Unknown; identical to SEQ ID NO: 32300
  Description of Unknown: RightRegion for integrase B6313 sequence

SEQ ID NO: 32313 - DNA, 109 bp, Unknown; identical to SEQ ID NO: 32210
  Description of Unknown: RightRegion for integrase B6314 sequence

SEQ ID NO: 32314 - DNA, 109 bp, Unknown
  Description of Unknown: RightRegion for integrase B6315 sequence
aagattatctacgatcgcaagaacgattctcttaaaatctactttttcttatacaggtaaaatgcccgcaaacccagtaaaatcaagggtttgcgggtactttataggt

SEQ ID NO: 32315 - DNA, 260 bp, Unknown; identical to SEQ ID NO: 32233
  Description of Unknown: RightRegion for integrase B6316 sequence

SEQ ID NO: 32316 - DNA, 260 bp, Unknown
  Description of Unknown: RightRegion for integrase B6317 sequence
aagatcatttatgataaagagtcggattctttgaaaatttatttttttctatgtcgttaagaatgcccgcaaacccagtaaaatcaagggtttgcgggcactttatacgttattgaagttcggtggaccggattgcaaggacgtataaagtaaaattgatgtggtttctacctattaaatagcaaccgcacgatgacgattgaaataaaaggatctggtaatgctacagaaataatagcaaataactgggataatctccc

SEQ ID NO: 32317 - DNA, 260 bp, Unknown
  Description of Unknown: RightRegion for integrase B6318 sequence
accgctactatttcggatttagacttatcaagtccaccatacgacacaaatccaccgtaattttgatggaattacggtggattttttatataatctgttgtcaaaaaggttatgtaatgaattggctattacattgttaaatgatactgtcaggatttgcgaagaaaccatgggcgaaaaagttctataatctgctatccggttctttaccatacgacgaaaagacacgctctgccgtgctggcagggcgtgtcttctta

SEQ ID NO: 32318 - DNA, 260 bp, Unknown; identical to SEQ ID NO: 32235
  Description of Unknown: RightRegion for integrase B6319 sequence

SEQ ID NO: 32319 - DNA, 260 bp, Unknown
  Description of Unknown: RightRegion for integrase B6320 sequence
aagattatatatgataaagagtcagattctttgaaaatttatttttttctatgtcgttaagaatgcccgcaaacccagtaaaatcaagggtttgcgggcactttatacgttattgaagttcggtggaccggattgtaaggacgtataaagtaaaatcaatgcagttccttcctattttaataatgcactatcctacatacacttttccaccataccttgcagcaatccagccggatggaatctgcatccagatatcgttt

SEQ ID NO: 32320 - DNA, 201 bp, Unknown
  Description of Unknown: RightRegion for integrase B6321 sequence
aagattatctacgatcgcaagaacgattctctcaaaatctactttttcttatacaggtaaagtatccgcaaacccagtaaaaccaagggtttgcgggtactttataggttgtgacaatttggttgacccaatggggatccaaatccctaggcgaccagggctattcccctatcgaaattctccgttactactacggtgacg

SEQ ID NO: 32321 - DNA, 260 bp, Unknown
  Description of Unknown: RightRegion for integrase B6322 sequence
aaaattatctacgatcgcaagaacgattctcttaaaatctactttttcctatacaggtaaaatacccgcaagcccagtaaaatcaaaggtttgcgggtactttataggttatgacaatttggatgacccaatggggatccaaatccttaggcgaccagggctattcccctatcgaaattctccgttactactacggtgacgacatgtacattaacaccgccgaagccatctccggcatcccatcctcctggcctggctat

SEQ ID NO: 32322 - DNA, 260 bp, Unknown
  Description of Unknown: RightRegion for integrase B6323 sequence
gatcttgatggtgaaaacatagacattcattggagctttgctcctggggaatcggaataaataaaggccgcccagcatgggcggccttttcgcttaatttgcggaatcgttgaatttacgcgcggttttcgctgacttttcgcaaaatgcgcggataacgcgattttgttgacgtcgccaaaatcggaatgttttcgcggcgtcacgaaaacatggagcggttacgggtctacccgtgtataacaaacgcaagcctccac

SEQ ID NO: 32323 - DNA, 260 bp, Unknown
  Description of Unknown: RightRegion for integrase B6324 sequence
cacatcgtgtttgaccgcggaaacacaagtctcgatatgttcctaaagcttgtaatttagcgggtttcaaggcattatagggtattacgatacggtggtcccgatggcgaaatgggagcttccatgcgctatctggcccagcggttttcttttgcaaatccgcggattgccggtgtacttaccgacatcggaaccgaggaacttgctcacctcgaaatgattggtgcgattgtccgccagctgacacgcggactttccgc

SEQ ID NO: 32324 - DNA, 260 bp, Unknown
  Description of Unknown: RightRegion for integrase B6325 sequence
aagattatctacgatcgtaagaatgattctcttaaaatctacttttttctgtataaatgatatattttaaatatcccacaagccaagtaaaatcaatggcttgcgggtactttataggttatgacaatttggttgacccaatggggatccaaatccttaggcgaccagggctattcccctatcgaaattctccgttactactacggtgacgacatgtacattaacaccgccgaagccatctccggcatcccatcctcctg

SEQ ID NO: 32325 - DNA, 109 bp, Unknown
  Description of Unknown: RightRegion for integrase B6326 sequence
ctggccaatccggtcaaggtgaagagttcgcataaagttcttatggtgaccccggagtgattcgaacactcgacacacggcttagaaggccgttgctctatccagctga

SEQ ID NO: 32326 - DNA, 260 bp, Unknown; identical to SEQ ID NO: 32283
  Description of Unknown: RightRegion for integrase B6327 sequence

SEQ ID NO: 32327 - DNA, 260 bp, Unknown; identical to SEQ ID NO: 32273
  Description of Unknown: RightRegion for integrase B6328 sequence

SEQ ID NO: 32328 - DNA, 260 bp, Unknown
  Description of Unknown: RightRegion for integrase B6329 sequence
gatcttgatggtgaaaacatagacattcattggagctttgctcctggggaatcggaataaataaaggccgcccatgctgggcggccttttcgcttaatttgcggaatcgctgaatttacgcgcggttttcgctgacttttcgcaaaatgcgcggataacgcgattttgttgacgtcgccaaaatcggaatgttttcgcggcgtcacgaaaacatggagcggttacgggtctacccgtgtataacaaacgcaagcctccac

SEQ ID NO: 32329 - DNA, 260 bp, Unknown
  Description of Unknown: RightRegion for integrase B6330 sequence
aagatcatctacgatcgcaaaaacgattctctcaaaatctactttttcttatacaggtaaaatgcccgcaaacctagtaaaatcaagggtttgcgggtgctttataggttataacaatttggttgacccaatggggatccaaatccttaggcgaccagggctattcccctatcgaaattctccgttactactacggtgacgacatgtacattaacaccgccgaagccatctccggcatcccatcctcctggcctggctat

SEQ ID NO: 32330 - DNA, 260 bp, Unknown
  Description of Unknown: RightRegion for integrase B6331 sequence
aaaattatctacgatcgcaagaacgattctcttaaaatctactttttcctatacaggtaaaatacccgcaagcccagtaaaatcaagggtttgcgggtactttataggttataacaatttggttgacccaatggggatccaaatccttaggcgaccagggctattcccctatcgaaattctccgttactactacggtgacgacatgtacattaacaccgccgaagccatctccggcatcccatcctcctggcctggctat

SEQ ID NO: 32331 - DNA, 260 bp, Unknown
  Description of Unknown: RightRegion for integrase B6332 sequence
cacatcgtattcgacaggaagaacacaagtcttgatgtgttcttaaagcttgtaatttagcggtttctatccgttatagggtattgcagtaccgacctccatataccaatagcctacaatataaataggaaggaactgttccgttttgttccttcctattctaccgtaaaacccatcatatttctacacaaaattatagcttgtccaagaactctttcttccacttcttatcgtcggtccagtatgctggacaaggcttt

SEQ ID NO: 32332 - DNA, 260 bp, Unknown
  Description of Unknown: RightRegion for integrase B6333 sequence
aagattatttatgataaagagtcagattctttaaaaatttatttttttctatgtcgttaaaaatgcccgcaaacccagtaaaatcaagggtttgcgggcactttatacgttattgaagttcggtggaccggatggagaattaggagcttctttgagatatttttctcagagatataccatgccttataatgaagtaattggcacactaacagacattgctaccgaagaatttgcccatatggaaatcatatgcgccattg

SEQ ID NO: 32333 - DNA, 145 bp, Unknown
  Description of Unknown: RightRegion for integrase B6334 sequence
cacatcgtgtttgaccgcagaaacacaagtctcgatatgttcctaaagcttgtaatttagcgggtttcaaggcattatagggtattacaatacggtggtcccgatggcgaaatgggagcttccatgcgctatctggcccagcggt

SEQ ID NO: 32334 - DNA, 260 bp, Unknown
  Description of Unknown: RightRegion for integrase B6335 sequence
aagattatctacgatcgcaagaacgattctctcaaaatctactttttcttatacaggtaaaatgcccgcaaccacagtaaaatcaagggtttgcgtgtactttataggttataacaatttggttgacccaatggggatccaaatccctaggcgaccagggctattcccctatcgaaattctccgttactactacggtgacgacatgtacattaacaccgccgaagccatctccggcatcccatcctcctggcctggctat

SEQ ID NO: 32335 - DNA, 260 bp, Unknown
  Description of Unknown: RightRegion for integrase B6336 sequence
aagattatctacgatcgcaagaacgattctcttaaaatctactttttcctatacaggtaaaatgcccgcaagcccagtaaaatcaagagtttgcgggtgctttataggttgtgacaatttggttgacccaatggggatccaaatccttaggcgaccagggctattcccctatcgaaattctccgttactactacggtgacgacatgtacattaacaccgccgaagccatctccggcatcccatcctcctggcctggctat

SEQ ID NO: 32336 - DNA, 260 bp, Unknown; identical to SEQ ID NO: 32252
  Description of Unknown: RightRegion for integrase B6337 sequence

SEQ ID NO: 32337 - DNA, 134 bp, Unknown
  Description of Unknown: RightRegion for integrase B6338 sequence
aagattatctacgatcgcaagaacgattctctcaaaatctactttttcttatacaggtaaaatacccgcaaacccagtaaaatgatatgctccccatatggtagacaatggaaatatccaaaaatctatcatat

SEQ ID NO: 32338 - DNA, 260 bp, Unknown
  Description of Unknown: RightRegion for integrase B6339 sequence
gaaaagatgtgctaccggaagcaaagttccgatatgtcgttgcacatcgattttttatgactttatatgtacaagtacgatatagtgtcaaagcacgatatgcttcttgtacatataaaaaaccgccaaaagcgtgtgctttgcacacgaatagcctgattttttgtttattgttcaatatgtacaagtcctatacgcttgttttgtgcaagtatacaaaagtgttccaattgtcataaaacgcttgacaaaagttcccg

SEQ ID NO: 32339 - DNA, 109 bp, Unknown
  Description of Unknown: RightRegion for integrase B6340 sequence
aagattatctacgatcgcaagaacgattctcttaaaatctactttttcctatacaggtaaagtacacgcaaacccagtaaaatcaagagcttgcgtgtactttataggt

SEQ ID NO: 32340 - DNA, 109 bp, Unknown
  Description of Unknown: RightRegion for integrase B6341 sequence
aagattatctacgatcgcaagaacgattctctcaaaatctactttttcttatacaggtaaaatgcccgcaaacccagtaaaatcaagagtttgcgtgtactttataggt

SEQ ID NO: 32341 - DNA, 260 bp, Unknown
  Description of Unknown: RightRegion for integrase B6342 sequence
aagattatctacgatcgcaagaacgattctcttaaaatctactttttcctatacaggtaaaatgcccgcaagcccagtaaaatcaagggtttgcgtatactttataggttatgacaatttggttgacccaatggggatccaaatccttaggcgaccagggctattcccctatcgaaattctccgttactactacggtgacgacatgtacattaacaccgccgaagccatctccggcatcccatcctcctggcctggctat

SEQ ID NO: 32342 - DNA, 260 bp, Unknown
  Description of Unknown: RightRegion for integrase B6343 sequence
aaaattatctacgatcgcaagaacgattctcttaaaatctactttttcctatacaggtaaaatacccgcaagcccagtaaatgtgagggtttggtaaggatgtttttaagatttaggttttgcggtatagtatgttgcgtactataccgcttttcctttccacaaagtgacctttgagtggtcgaatactccgatatggttatagataatttcaatttcctgtaagcgtttaccgctgctcttatcaggagcatggacaa

SEQ ID NO: 32343 - DNA, 109 bp, Unknown
  Description of Unknown: RightRegion for integrase B6344 sequence
aagatcatttatgataaagagtcagattctttgaaaatttatttttttctatgtcgttaagaatgcccgcaaacccagtaaaatcaagggtttgcgggcactttatacg

SEQ ID NO: 32344 - DNA, 260 bp, Unknown
  Description of Unknown: RightRegion for integrase B6345 sequence
cacatcgtgtttgaccgcggaaacacaagtctcgatatgttcctaaagcttgtaatttagcgggtttcaaggcattatagggtattacgatacggtggtcccgatggcgaaatgggagcttccatgcgctatctggcccagcggttttcttttgcaaatccgcggattgccggtgtacttactgacatcggaaccgaggaacttgctcacctcgaaatgattggtgcgattgtccgccagctgacgcgcggactttccgc

SEQ ID NO: 32345 - DNA, 260 bp, Unknown
  Description of Unknown: RightRegion for integrase B6346 sequence
aaaattatctatgatcgtaagaatgattctcttaaaatctactttttcttatacaggtaaaatgcccgcaaacccagtaaaaatcaagagcttgcgtgtactttataggttataacaatttggttgacacaatggggatccaaatcattaggcgatcagggctactcccctatcgaaatcctacgctattattatggtgatgacatgtacatcaacaccgccgaagccatctccggcattccgtcctcctggcctggtta

SEQ ID NO: 32346 - DNA, 109 bp, Unknown
  Description of Unknown: RightRegion for integrase B6347 sequence
cacatcgtgtttgaccgcgaaaacacaagtctcgatatgttcctaaagcttgtaatttagcgggtttcaaggcattatagggtattacagtacggtggtcccgatggcg

SEQ ID NO: 32347 - DNA, 260 bp, Unknown
  Description of Unknown: RightRegion for integrase B6348 sequence
cttatagaaaaggtgtctatcgactataaaaacaatatcacaatcgcctggaaggtttgattttactgcacttcactttagtgtctattgttgatacgttaggcactaaagtgcatagctgatatattgatataacattatccacaaagtcaaattttatataaaaaaatatatacattctcttatttaaacattataattaatttaaagaaatataggtgaatattattcttatagaaggtgaacatatgagtactccg

SEQ ID NO: 32348 - DNA, 260 bp, Unknown
  Description of Unknown: RightRegion for integrase B6349 sequence
aagattatttatgataaagagtcagattctttaaaaatttatttttttctatgtcgttaaaaatgcccgcaaacccagtaaaatcaagggtttgcgggcactttatacgttattgaagttcggtggaccggatggagaattaggagcttctttgagatatttttctcagagatataccatgccttataatgaagtaattggcacactaacagacattgctaccgaggaatttgcccatatggaaatcgtatgcgccattg

SEQ ID NO: 32349 - DNA, 109 bp, Unknown
  Description of Unknown: RightRegion for integrase B6350 sequence
aagattatttatgataaagagtcagattctttgaaaatttatttttttctatgtcgttaagaatgcccgcaaacccttgattttactgggtttgcgggcactttatacg

SEQ ID NO: 32350 - DNA, 260 bp, Unknown; identical to SEQ ID NO: 32245
  Description of Unknown: RightRegion for integrase B6351 sequence

SEQ ID NO: 32351 - DNA, 109 bp, Unknown; identical to SEQ ID NO: 32210
  Description of Unknown: RightRegion for integrase B6352 sequence

SEQ ID NO: 32352 - DNA, 260 bp, Unknown
  Description of Unknown: RightRegion for integrase B6353 sequence
aaaattatctacgatcgcaagaacgattctcttaaaatctactttttcctatacaggtaaaatacccgcaagcccagtaaaatcaaaggtttgcgggtactttataggttatgacaatttggttgacccaatggggatccaaatccctaggcgaccagggctattcccctatcgaaattctccgttactactacggtgacgacatgtacattaacaccgccgaagccatctccggcatcccatcctcctggcctggctat

SEQ ID NO: 32353 - DNA, 100 bp, Unknown
  Description of Unknown: RightRegion for integrase B6354 sequence
cacatcgtgtttgaccgcggaaacacaagtctcgatatgttcctaaagcttgtaatttaacgggtttcaaggcattatagggtattacgatacggtggtc

SEQ ID NO: 32354 - DNA, 260 bp, Unknown
  Description of Unknown: RightRegion for integrase B6355 sequence
gaaaagatagtatttgaccgggaaacccggagttttacgttcttttactacacatcataagttattacaatacggcggccccgacggcgagatgggcgcatccatgcgctatctgtcccagcgctacgccatgccttataaagaaggcaaggctgttttgaccgatatcggcacagaggaattggcacatctggaaatgatcgccgccattgtccatcagctgacccggaacctcacagccgagcagctggtagaacagg

SEQ ID NO: 32355 - DNA, 260 bp, Unknown
  Description of Unknown: RightRegion for integrase B6356 sequence
gaaaagaccgagcgcggcacgggattgaacccacgcctgcgcgtaactctcagagtctaaatgtttatcatcttgtgccagatttatagggcacgcgatgataaacagacagagaacatagacaaacataggcggatagcgtagtgctacccgccttttttgtgcttagcttacccgcttccacatgaacacgaccagatatggaggaaggttgttgtgtggcttgccgccgccagtcgaacccgtcacgccaccttggt

SEQ ID NO: 32356 - DNA, 260 bp, Unknown
  Description of Unknown: RightRegion for integrase B6357 sequence
gaaaagaccgagcgcggcacggggttgaacccacgcctgcgcgtaaccctcaaaatctaatgtttatcatcttgtacccgatttatagggcacgcgatgataaacagactacaaaacttataaatgtataaaaacgggggaacctgcaagacaagcgggttcccctttttcgcgtcatgccgtccgtttccacatgtagaccaccaaatatggtggcatattattatgcggctgggaaccgccagcgtacatcgtctgaa

SEQ ID NO: 32357 - DNA, 260 bp, Unknown
  Description of Unknown: RightRegion for integrase B6358 sequence
gaaaagaccgaacgcggcacgggattgaacccacgcctgcgcgtaactctcaaaatctaatgtttatcatcttgtgactgatttatagggcacgcgatgataaacagacttacaaaacttacaaggcggatagctcaagggctacccgcctttttattatgtgctcaacttacccgtttaaacatgtacacagtcaaatatggcggcatattattatgtgccttgccgccgcctgcatacatggtctgtacgttgccgcc

SEQ ID NO: 32358 - DNA, 260 bp, Unknown
  Description of Unknown: RightRegion for integrase B6359 sequence
gaaaagaccgagcgcggcacgggattgaacccacgcctgcgcgtaactctcagaatctaaatgtttatcatcttgtgccagatttatagggaacgcgatgataaacagacagagaatatagacaaacataggcggatagcgtagtgctacccgccttttttgtgcttagcttacccgcttccacatgaacacgaccagatatggaggaaggttgttgtgcggcttgccgccgccagtagcccccgtcacgccgccttggt

SEQ ID NO: 32359 - DNA, 139 bp, Unknown
  Description of Unknown: RightRegion for integrase B6360 sequence
tataaacgtgaaaaatccgctcccgagggcgatattttcttgaaaatctattataaataactttttacccgccttatgtatcttgttgccatagctgtatagataacaacaagatacccaaccaaaaagaacataagca

SEQ ID NO: 32360 - DNA, 260 bp, Unknown
  Description of Unknown: RightRegion for integrase B6361 sequence
ctgattgataaagttgtagtcctcaatacagatgtcaccatttactggtctttctgctgatcatcctttaataccagcctgcagatagtttctacatttgcggtccaggggaactggtccacagcgcaggctttctctaccacatagccgccagccaggaaaacttccaagtctcttaccagactggtcggtttgcatgaaatgtaaatgatagttttacacctaatagtggcaatgatcttaacgaatgcttctattag

SEQ ID NO: 32361 - DNA, 109 bp, Unknown
  Description of Unknown: RightRegion for integrase B6362 sequence
tataaacgtgaaaaatccgctcccgagggcgatattttcttaaaaatctattataaataactttttacccaccttatgtatcttgttgccatagctgtcgccatagcaa

SEQ ID NO: 32362 - DNA, 260 bp, Unknown
  Description of Unknown: RightRegion for integrase B6363 sequence
gaaaagatagtatttgaccgggaaacccggagttttacgttcttttactacacatcataagttattacaatacggcgggccagaatgtcataacttatgatgtttattcctaatataaagggtgactgccaaaaacataggtgaattgaaaaagtaaattccgctttgcaagattaaattccactttgaaaagataaattctacccaaatacagaaaaaatgagattttatatatgaaatacccagaatcagagttaaaa

SEQ ID NO: 32363 - DNA, 109 bp, Unknown
  Description of Unknown: RightRegion for integrase B6364 sequence
tataaacgtgaaaaatccgctcccgagggcgatatcttcttgaaaatctattataaataactttttacccgccttatgtatcttgttgccatagctgtcgccatagcaa

SEQ ID NO: 32364 - DNA, 260 bp, Unknown
  Description of Unknown: RightRegion for integrase B6365 sequence
tataaacgtgaaaaatccgctcccaagggcgatattttcttgaaaatctattataaataactttttacccaccttatgtatcttgttgccatagctgtcgccatagcaatccataatattccggaaggaattgctacatctgtaccgatatactactcaacaggcagcagaaaaagagcatttatagtatcgtttttttcgggtattacggaacctttaggtgctataatcggttatttaattttacgtccgtttttcaa

SEQ ID NO: 32365 - DNA, 260 bp, Unknown
  Description of Unknown: RightRegion for integrase B6366 sequence
tataaacgtgaaaaatccgctcccgagggcgatattttcttgaaaatctattataaataactttttatccatcttatgtatcttgttgccatagctgtcgccatagcaatccataatattccggaaggaattgctacttctgtaccgatatactactcaacaggcagcagaaaaagagcatttatagtatcgtttttttcgggtattacggaacctttaggtgctataatcggttatttaattttacgtccgtttttcaa

SEQ ID NO: 32366 - DNA, 260 bp, Unknown
  Description of Unknown: RightRegion for integrase B6367 sequence
gaaaagaccgagcgcggcacaggattgaacccacgcctgcgcgtaactctcagaatctaaatgtttatcatcttgtgccagatttatatggcacaagatgataaacagacagagaatatagacaaacataggcggatagcgtagtgctacccgccttttttgtgcttagcctacacgcttccacatgaacacgaccagatatggaggaaggttgttgtgtggcttgccgccgccagtcgcctccgtcgagctgccttggt

SEQ ID NO: 32367 - DNA, 260 bp, Unknown
  Description of Unknown: RightRegion for integrase B6368 sequence
gaaaagaccgagcgcggcacgggattgaacccacgcctgcgcgtaactctcagaatctaaatgtttatcatcttgtgcccgatttatagggcacgcgatgataaacagacagagaatatagacaaacataggcggatagcccgacggctacccgcctttttatgttgcagaaacacaagatgtgggggcgcatcaataggtgtatacaacatatagggggaaaccgctcggttccccccttttttcgcgctaaatgcccc

SEQ ID NO: 32368 - DNA, 260 bp, Unknown
  Description of Unknown: RightRegion for integrase B6369 sequence
tataaacgtgaaaaatccgctcccgagggcgatattttcttgaaaatctattataaataactttttatccatcttatgtatcttgttgccatagctgtcgccatagcaatccataatattccggaaggaattgctacgtctgtaccgatatactactcaacaggcagcagaaaaagagcatttatagtatcgtttttttcgggtattacggaacctttaggtgctataatcggttatttaattttacgtccgtttttcaa

SEQ ID NO: 32369 - DNA, 260 bp, Unknown
  Description of Unknown: RightRegion for integrase B6370 sequence
agaaccgagatctgcgccgttgggaccgtcgtgctgctcaggataccacgggcggcgtagcaacaccttttctcgagaaaaaacccgcccgggataacccgagcgggccgcggctagcgcccgttgatgctcacgaggcacaggccgattgtcgccacggtgccgccgaagagcgcgccgaggacgaaagccagcgcgatcatgctagtacgggttgccgtcggtgacgcagacttggagtcggtcgagcggctcgccgt

SEQ ID NO: 32370 - DNA, 260 bp, Unknown
  Description of Unknown: RightRegion for integrase B6371 sequence
agaatttgctcgacgtgtacccgctgctcgaaacggccgaggagaaaaacgctctcctaaaagaggtgctcgaaaaggtcgtctatcagaagctaaacgagaagcgcaaaaagagccctgacggctttaccattgagatatacccgcgcatcccaaaatccgaaaaatgaaaagagagggccgtttcggtcctctctttcttatagttatcctgtttagccatactcatctttcatgccgtaaacactcagcatctctgc

SEQ ID NO: 32371 - DNA, 260 bp, Unknown
  Description of Unknown: RightRegion for integrase B6372 sequence
tataaacgtgaaaaatccgctcccaagggcgatattttcttgaaaatctattataaataactttttacccaccttatgtatcttgttgccatagctgtatggataacaacaagatacccaaccaaaaagaacataagcattttgcctatgttctttcttaattatataaggtttttaatatattttttagaaggatattcaatttattttaatattcaaatcttttagccggatatgtttttaataaatccatatctcga

SEQ ID NO: 32372 - DNA, 260 bp, Unknown
  Description of Unknown: RightRegion for integrase B6373 sequence
gaaaagaccgagcgcggcacgggattgaacccacgcctgcgcgtaactctcagaatctaaatgtttatcatcttgtgccagatttatagggcacgcgatgataaacagacagagaatatagacaaacataggcggatagcgtagtgctacccgccttttttgtgcttagcttacccgcttccacatgaacacgaccagatatggaggaaggttgttgtgtggcttgccgccgccagccgcctccgtcgagctgccttggt

SEQ ID NO: 32373 - DNA, 260 bp, Unknown
  Description of Unknown: RightRegion for integrase B6374 sequence
ctaactgataaagttgtggttctcaatgcagatgtcacgatttactggtctttctgctgatcctcctttaataccagcctgcagatagtttctacgttcgcagtccagggaaactggtccactgcgcaggctttctctaccacatacccgccggccagaaaaacttccaagtctcttaccaagctggtcggtttgcacgaaatgtaaatgattgttttacacctaatagtggcaatgatcttcggcagtgccttggggtg

SEQ ID NO: 32374 - DNA, 260 bp, Unknown
  Description of Unknown: RightRegion for integrase B6375 sequence
tataaacgtgaaaaatccgctcccgagggcgatattttcttgaaaatctattataaataactttttaaccaccttatgtatcttgttgccatagctgtcgccatagcaatccataatattccggaaggaattgctacgtctgtaccgatatactactcaacaggcagcagaaaaagagcatttatagtatcgtttttttcgggtattacggaacctttaggtgctataatcggttatttaattttacgtccgtttttcaa

SEQ ID NO: 32375 - DNA, 260 bp, Unknown
  Description of Unknown: RightRegion for integrase B6376 sequence
ataaaatctatcatttacaataaacgtgaagatactttaactactattttttatatttaaaaacgttgccttaaaatgcatttaggttctccaataggtggacacattgcagttgcttcaagcttcgtcattgtgtcacatggatgacatatatcacaaacacctgcattaggtgctttgaaaaatcttgtgtctgtatttgaacatttgctcataattccaaacctcctacatgtttgctaaggtgggtcataaaaatg

SEQ ID NO: 32376 - DNA, 122 bp, Unknown
  Description of Unknown: RightRegion for integrase B6377 sequence
gaaaagatagtatttgaccgggaaacccggagttttacgttcttttactacacatcataagttattacaatacggcggccccgacggcgagatgggcgcatccatgcgctatctgtcccagc

SEQ ID NO: 32377 - DNA, 260 bp, Unknown
  Description of Unknown: RightRegion for integrase B6378 sequence
tataaacgtgaaaaatccgctcccaagggcgatattttcttgaaaatctattataaataactttttacccaccttatgtatcttgttgccatagctgtcgccatagcaatccataatattccggaaggaattgctacgtctgtaccgatatactactcaacaggcagcagaaaaagagcatttatagtatcgtttttttcgggtattacggaacctttaggtgctataatcggttatttaattttacgtccgtttttcaa

SEQ ID NO: 32378 - DNA, 109 bp, Unknown
  Description of Unknown: RightRegion for integrase B6379 sequence
ctgattgataaagttgtggttctcaatgcagatgtcacgatttactggtctttctgctgatcctcctttaataccagcctgcagatagtttctacgttcgcagtccagg

SEQ ID NO: 32379 - DNA, 260 bp, Unknown
  Description of Unknown: RightRegion for integrase B6380 sequence
tataaacgtgaaaaatccgctcccgagggcgatattttcttgaaaatctattataaataactttttatccatcttatgtatcttgttgccatagctgttgccatagcaatccataatattccggaaggaattgctacgtctgtaccgatatactactcaacaggcagcagaaaaagagcatttatagtatcgtttttttctggtattacggaacctttaggtgctataatcggttatttaattttacgtccgtttttcaa

SEQ ID NO: 32380 - DNA, 260 bp, Unknown
  Description of Unknown: RightRegion for integrase B6381 sequence
tataaacgtgaaaaatccgctcccgagggcgatattttcttgaaaatctattataaataactttttatccaccttatgtatcttgttgccatagttgtcgccatagcaatccataatattccggaaggaattgctacgtctgtaccgatatactactcaacaggcagcagaaaaagagcatttatagtatcgtttttttcgggtattacggaacctttaggtgctataatcggttatttaattttacgtccgtttttcaa

SEQ ID NO: 32381 - DNA, 260 bp, Unknown
  Description of Unknown: RightRegion for integrase B6382 sequence
gaaaagaccgagcgcggcacgggattgaacccacgcctgcgcgtaactctcagaatctaaatgtttatcatcttgtgcccgatttatagggcacgcgatgataaacagacagagaatatagacaaacataggcggatagcgtagtgctacccgccttttttgtgcttagcttacccgcttccacatgtacacaacgagataaggcggcatattgttgtgcgacttgccgccgccagtcgcctccgtcgcgctgccttggt

SEQ ID NO: 32382 - DNA, 109 bp, Unknown; identical to SEQ ID NO: 32378
  Description of Unknown: RightRegion for integrase B6383 sequence

SEQ ID NO: 32383 - DNA, 260 bp, Unknown
  Description of Unknown: RightRegion for integrase B6384 sequence
acgaaagaatatacaaacgggagggcaggaaatgtcaatggaaaactgtgcaaacactaaacccaaaattacgattatcccagccaagacgagagtcgaacgacttgaccctttgtcaatagcgatggggcaaaagccaaaaatacgagtggctgcatacgcacgcgtgtcgaccgatcacgaagaacaggagagcagttacgaggcacaggtagaccacttcaccaaactcatagcaagccatgatgattggacgatgg

SEQ ID NO: 32384 - DNA, 260 bp, Unknown
  Description of Unknown: RightRegion for integrase B6385 sequence
ctaatagataagattgtggttcttaatcgcgatgtaactatctactggtcattctcttaagggcacagatagtctcaacatggtaagtgttgggaaacatatcgacgcaggctatcttttcaacgtgatagccgccttcctgcaatagcttcaggtctctcgcaaggcttgaaggcttgcaggaaatgtaaatcattctatctaccctaaacatatctattatcttgccgatagccttcggatgaattccatctcgtggc

SEQ ID NO: 32385 - DNA, 260 bp, Unknown
  Description of Unknown: RightRegion for integrase B6386 sequence
tataaacgcgaaaaatccgctcccgagggcgatattttcttgaaaatctattataaataactttttatccaccttatgtatctcgttgccatagctgtcgccatagcaatccataatattccggaaggaattgctacgtctgtaccgatatactactcaacaggcagcagaaaaagagcatttatagtatcgtttttttcgggtattacggaacctttaggtgctataatcggttatttaattttacgtccgtttttcaa

SEQ ID NO: 32386 - DNA, 260 bp, Unknown; identical to SEQ ID NO: 32385
  Description of Unknown: RightRegion for integrase B6387 sequence

SEQ ID NO: 32387 - DNA, 260 bp, Unknown
  Description of Unknown: RightRegion for integrase B6388 sequence
gaaaagaccgagcgcggcacgggattgaacccacgcctgcgcgtaactctcaaaatctaaatgtttatcatcttgtgccagatttatagggcacgcgatgataaacagacagagaatatagacaaacataggcggatagcgtagtgctacccgccttttttgtgcttagcttactctcttccacatgtacacaacgagatacggggggaggttgttgtgtggcttgccgccaccagtagcgccagtcacacttccctgat

SEQ ID NO: 32388 - DNA, 260 bp, Unknown
  Description of Unknown: RightRegion for integrase B6389 sequence
gaaaagaccgagcgcggcacgggattgaacccacgcctgcgcgtaactctcagaatctaaatgtttatcatcttgtgccagatttatagggcacaagatgataaacagacagagaatatagacaaacataggcggatagcgtaatgctacccgccttttttgtgcttagcttacccgcttccacatgtacaccacgaggtacggcggcatattgctgtgagccttgccaccaccagtcgagccagtcacgccaccttggt

SEQ ID NO: 32389 - DNA, 260 bp, Unknown
  Description of Unknown: RightRegion for integrase B6390 sequence
tataaacgtgaaaaatccgctcccgagggcgatattttcttgaaaatctattataaataactttttacccgccttatgtatcttgttgccatagctgtcgccatagcaatccataatattccggaaggaattgctacgtctgtaccgatatactactcaacaggcagcagaaaaagagcatttatagtatcgtttttttcgggtattacggaacctttaggtgctataatcggttatttaattttacgtccgtttttcaa

SEQ ID NO: 32390 - DNA, 260 bp, Unknown
  Description of Unknown: RightRegion for integrase B6391 sequence
tataaacgtgaaaaatccgctcccgagggcgatattttcttgaaaatctattataaataactttttacccaccttatgtatcttgttgccatagctgtcgccatagcaatccataatattccggaaggaattgctacgtctgtaccgatatactactcaacaggcagcagaaaaagagcatttatagtatcgtttttttcgggtattacggaacctttaggtgctataatcggttatttaattttacgtccgtttttcaa

SEQ ID NO: 32391 - DNA, 260 bp, Unknown
  Description of Unknown: RightRegion for integrase B6392 sequence
aaacagatcgtttttgaccgtgaaacccggcgttttatcttttattactacacatcataagttattgcattacgggccaccatactgactcataataaactgtgccaactttgcatttggttccttaatattaaccggaaactgcaggcgtttttcataaatccacattatacgttccccccttcccatggccatggatcgctgacccaggtccagtatgcgttctcaggaacgtttcccgcattcaaagggccaaactg

SEQ ID NO: 32392 - DNA, 260 bp, Unknown
  Description of Unknown: RightRegion for integrase B6393 sequence
ctgattgataaagttgtagtcctcaatacagatgtcaccatttactggtctttctgctgatcatcctttaataccagcctgcagatagtttctacatttgcggtccaagggaactggtccacagcgcaggctttctctaccacatagccgccagccaggaaaacttccaggtctcttaccagactggtcggtttgcatgaaatgtaaatgatagttttacacctaatagtggcaatgatcttcggcagtgccttggggtg

SEQ ID NO: 32393 - DNA, 260 bp, Unknown
  Description of Unknown: RightRegion for integrase B6394 sequence
ctgattgataaagttgtagtcctcaatacagatgtcaccatttactggtctttctgctgatcatcctttaataccagcctgcagatagtttctacatttgcggtccaggggaactggtccacagcgcaggctttctctaccacatagccaccagccaggaaaacttccaggtctcttaccaggctggtcggtttgcatgaaatataaatgatggttttacacctaatagtggcaatgatcttcggcagtgccttggggtg

SEQ ID NO: 32394 - DNA, 260 bp, Unknown
  Description of Unknown: RightRegion for integrase B6395 sequence
acgaaagaatatacaaacgggagggcaggaaatgtcaatggaaaactgtgcaaacactaaacccaaaattacgattatcccagccaagacgagagtcgaacgacttgaccctttgtcaatagcgatggggcaaaagccaaaaatacgagtggctgcatacgcacgcgtgtcgaccgaccacgaagaacaggagagcagttacgaggcacaggtagaccacttcaccaaactcatagcaagccatgatgattggacgatgg

SEQ ID NO: 32395 - DNA, 109 bp, Unknown
  Description of Unknown: RightRegion for integrase B6396 sequence
aaaaagatagtgttcgaccgggaaacccggcgttttacgttcttcttttacacctcataagttattgcagtttggcggccccgacggcgagatgggcgcatccatgcgc

SEQ ID NO: 32396 - DNA, 109 bp, Unknown
  Description of Unknown: RightRegion for integrase B6397 sequence
cacatcacgttcgatcgcaagaatacaagtcttgatatgttcctaaagctagtaatttagcgggtttcaaagcattatagggtattgcagtacggtggtcccgatggcg

SEQ ID NO: 32397 - DNA, 260 bp, Unknown
  Description of Unknown: RightRegion for integrase B6398 sequence
tataaacgtgaaaaatccgctcccgagggcgatattttcttgaaaatctattataaataactttttatccaccttatgtatcttgttgccatagttgtcgccatagcaatccataatattccggaaggaattgctacttctgtaccgatatactactcaacaggcagcagaaaaagagcatttatagtatcgtttttttcgggtattacggaacctttaggtgctataatcggttatttaattttacgtccgtttttcaa

SEQ ID NO: 32398 - DNA, 260 bp, Unknown; identical to SEQ ID NO: 32397
  Description of Unknown: RightRegion for integrase B6399 sequence

SEQ ID NO: 32399 - DNA, 260 bp, Unknown
  Description of Unknown: RightRegion for integrase B6400 sequence
gaaaagaccgagcgcggcacgggattgaacccacgcctgcgcgtaactctcagaatctaaatgtttatcatcttgtgcccgatttatagggcacaagatgataaacagacagagaatatagacaaacataggcggatagcgcaacggctacccgccttttttgtgcttagcttacacgcctccacatgtacacaacgagatacggggggaggttgttgtgtggcttgccgccaccagtagcttcagtcgcacttccctga

SEQ ID NO: 32400 - DNA, 260 bp, Unknown
  Description of Unknown: RightRegion for integrase B6401 sequence
tataaacgtgaaaaatccgctcccgagggcgatattttcttgaaaatctattataaataacttttacccgccttatgtatcttgttgccatagctgtcgccatagcaatccataatattccggaaggaattgctacgtctgtaccgatatactactcaacaggcagcagaaaaagagcatttatagtatcgtttttttcgggtattacggaacctttaggtgctataatcggttatttaattttacgtccgtttttcaac

SEQ ID NO: 32401 - DNA, 260 bp, Unknown
  Description of Unknown: RightRegion for integrase B6402 sequence
aaagctataggagaatttaaaaatataaaaaatttaggctatgtcacaacaaacagttgataaatagccatttttataggggagtatcagaactcccctacaaactgttatttgcagttatctatactcatttggaatttcgatatgaagtgtctcacacaataacttcacatcatgtgcatcattttcatcaaactcgtatcccagatggaacattacttgactatatggttcaatacaggaaacctctatttcctcaa

SEQ ID NO: 32402 - DNA, 260 bp, Unknown; identical to SEQ ID NO: 32392
  Description of Unknown: RightRegion for integrase B6403 sequence

SEQ ID NO: 32403 - DNA, 260 bp, Unknown
  Description of Unknown: RightRegion for integrase B6404 sequence
gcaatacgtggagtaattagtaaacttacttgggatggagagaacataataatttcataactatttaaagacacctcgtactcctggtgcccctattgcaaacacccctaataatactataaacaatatcatagttggtaaactaggaatcttaccatataaaatttgagatactgtcattacaaaaaatacttctgtaagaactgaaccacataaatgtatgtttgaacataatggtattgcaaaatccactatatctt

SEQ ID NO: 32404 - DNA, 260 bp, Unknown
  Description of Unknown: RightRegion for integrase B6405 sequence
gaaaagaccgagcgcggcacgggattgaacccacgcctgcgcgtaactctcagaatctaaatgtttatcatcttgtgccagatttatagggcacgcaatgataaacagacagagaacatagacaaacataggcggatagcgtagtgctacccgccttttttatgcttagcttacccgcttccacatgaacacgaccagatatggaggaaggttgttgtgtggcttgccgccgccagtcgcctccgtcgagctgccttggt

SEQ ID NO: 32405 - DNA, 260 bp, Unknown; identical to SEQ ID NO: 32380
  Description of Unknown: RightRegion for integrase B6406 sequence

SEQ ID NO: 32406 - DNA, 260 bp, Unknown; identical to SEQ ID NO: 32380
  Description of Unknown: RightRegion for integrase B6407 sequence

SEQ ID NO: 32407 - DNA, 260 bp, Unknown
  Description of Unknown: RightRegion for integrase B6408 sequence
aaacgtatcgaggtactaccggatccggactctataaaaatatattggaaattcgtctaagcctgtaaccgcaaggcttagagagttttaccctaattgtgggcatggtttcaaccgtatccacgatttaggtaaataattttcggttttcttcctatttatatggagtatgcacattttcgatatttttaaaactattttcgatttttcgatatttgttattgacttttcgaaaattcggtagtataataaagacagtt

SEQ ID NO: 32408 - DNA, 260 bp, Unknown
  Description of Unknown: RightRegion for integrase B6409 sequence
tataaacgtgaaaaatccgctcccgagggcgatattttcttaaaaatctattataaataactttttacccaccttatgtatcttgttgccatagctgtcgccatagcaatccataatattccggaaggaattgctacgtctgcaccgatatactactcaacaggcagcagaaaaagagcatttatagtatcgtttttttcgggtattacggaacctttaggtgctataatcggttatttaattttacgtccgtttttcaa

SEQ ID NO: 32409 - DNA, 260 bp, Unknown
  Description of Unknown: RightRegion for integrase B6410 sequence
gaaaagaccgagcgcggcacgggattgaacccacgcctgcgcgtaactctcagaatctaaatgtttatcatcttgtgccagatttatagggaacgcgatgataaacagacagagaatatagacaaacataggcggatagcgtagtgctacccgccttttttgtgcttagcttacccgcttccacatgaacacgaccagatctggaggaaggttgttgtgcggcttgccgccgccagtagcccccgtcacgccgccttggt

SEQ ID NO: 32410 - DNA, 260 bp, Unknown
  Description of Unknown: RightRegion for integrase B6411 sequence
aaaaagatagtgttcgaccgggaaacccggcgttttacgttcttcttttacacctcataagttattgcagtttggcggtccggacggtgaattagctgcttccatgcgttatctttcccaacgctacaccatgccatgcagagaagcagcgggacttttaacggatatcggcacagaagaactggctcatctggaaatcatctgcgctatggtatttcagcttaccaaagacctgacggcagaacaggcaaagacagccg

SEQ ID NO: 32411 - DNA, 260 bp, Unknown
  Description of Unknown: RightRegion for integrase B6412 sequence
gaaaagaccgagcgcggcacggggttgaacccacgcctgcgcgtaactctcagaatctaaatgtttatcatcttgtgccagatttatagggcacgcgatgataaacagacagagaatataggcaaacataggcggatagcgtagtgctacccgccttttttgtgcttagcttacccgcttccacatgaacacaaccagatacggaggaaggttgttgtgtggcttgccgccgccagtcgcgcttgtggtggtgccttggt

SEQ ID NO: 32412 - DNA, 260 bp, Unknown; identical to SEQ ID NO: 32394
  Description of Unknown: RightRegion for integrase B6413 sequence

SEQ ID NO: 32413 - DNA, 260 bp, Unknown
  Description of Unknown: RightRegion for integrase B6414 sequence
tataaacgtgaaaaatccgctcccgagggcgatattttcttgaaaatctattataaataactttttacccaccttatgtatcttgttgccataactgtcgccatagcaatccataatattccggaaggaattgctacttctgtaccgatatactactcaacaggcagcagaaaaagagcatttatagtatcgtttttttcgggtattacggaacctttaggtgctataatcggttatttaattttacgtccgtttttcaa

SEQ ID NO: 32414 - DNA, 109 bp, Unknown
  Description of Unknown: RightRegion for integrase B6415 sequence
gaaaagatagtatttgaccgggaaacccggagttttacgttcttttattacacatcataggttattacagtacggcggccccgacggcgagatgggcgcatccatgcgc

SEQ ID NO: 32415 - DNA, 260 bp, Unknown
  Description of Unknown: RightRegion for integrase B6416 sequence
tataaacgtgaaaaatccgctcccgagggcgatattttcttgaaaatctattataaataactttttatccatcttatgtatcttgttgccatagctgttgccatagcaatacacaacatacctgaaggaattgctacgtctgtgccgatatactattccacaggcagcagaaaaagagcatttatggtatcgttcttttcgggcattacagaacctttaggtgctataatcggttatttaattttacgtccgtttttcaa

SEQ ID NO: 32416 - DNA, 260 bp, Unknown
  Description of Unknown: RightRegion for integrase B6417 sequence
acgaaagaatatacaaacgggagggcaggaaatgtcaatggaaaactgtgcaaacactaaacccaaaattacgattattccagcgaaaacaagagtcgaacggcttgaccctatgtcggtagcgatgggacaaaagcctaaaatacgagtggctgcatatgcacgcgtgtcgaccgaccacgaagaacaggagagcagttacgaggcacaggtagaccacttcaccaaactcatagcaagccatgatgattggacgatgg

SEQ ID NO: 32417 - DNA, 260 bp, Unknown
  Description of Unknown: RightRegion for integrase B6418 sequence
tataaacgtgaaaaatccgctcccgagggcgatattttcttgaaaatctattataaataactttttattcaccttatgtatcttgttgccatagctgtcgccatagcaatccataatattccggaaggaattgctacgtctgtaccgatatactactcaacaggcagcagaaaaagagcatttatagtatcgtttttttcgggtattacggaacctttaggtgctataatcggttatttaattttacgtccgtttttcaa

SEQ ID NO: 32418 - DNA, 260 bp, Unknown
  Description of Unknown: RightRegion for integrase B6419 sequence
acgaaagaatatacaaacgggagggcgggaaatgtcaatggaaaactgtgcaaacactaaacccaaaattacgattataccagcgaaaacaagagtcgaacggcttgaccctatgtcgatagcgatgggacaaaagcctaaaatacgagtggctgcatatgcacgagtgtcgaccgaccacgaagaacaggagagcagttacgaggcacaggtagaccacttcaccaaactcatagcaagccatgatgattggacgatgg

SEQ ID NO: 32419 - DNA, 260 bp, Unknown; identical to SEQ ID NO: 32377
  Description of Unknown: RightRegion for integrase B6420 sequence

SEQ ID NO: 32420 - DNA, 260 bp, Unknown
  Description of Unknown: RightRegion for integrase B6421 sequence
gcacagcagggcaagaaggggtttgctcctgagtctgttgagatcgtgtggaagcagtgaggctccgccgtggtgctgtgggtggggttcaagaagcatccgagaccgcgccctagcgggcgcgatgaggagcaactgtacagcgcccctatggggcgcgagctcatcctcactcgtgcatgatctcgtgggagaaagtgaatgatggggaggtcatgctcataacctcaccttggaaacctcacctcaggagttgtatc

SEQ ID NO: 32421 - DNA, 260 bp, Unknown
  Description of Unknown: RightRegion for integrase B6422 sequence
tataaacgtgaaaaatccgctcccgagggcgatatcttcttgaaaatctattataaataactttttacccgccttatgtatcttgttgccatagctgtatctattcccgacataccattcatttctatgtctaaaataactatatcatatatatcttcattattgtaatgactaagtaaagattcacctgatataaaaacatcatattcaatttcattatatattgattttatttttttaatatattcttcaatatgatt

SEQ ID NO: 32422 - DNA, 260 bp, Unknown
  Description of Unknown: RightRegion for integrase B6423 sequence
gaaaggatgtgctaccggaagcgagattcagatatgtcgttgcgcatcgattttttataacttaatatgtacaagtacaatataatgttttgacattgtatctaacttgtacatattaaggctttcaaaaagcgtacaatacactcattctggacttttttactattgtgcaatttgcataattcatacgtttgtgtattgtgcatatgtacaaaactaccacgcaatgcgtagtttcctattgacataccacgcaatgc

SEQ ID NO: 32423 - DNA, 140 bp, Unknown
  Description of Unknown: RightRegion for integrase B6424 sequence
cctctgaaagccgtcgaagatgcgtttggttcggatttaactcaagttgctccaccataatttggggttgtctcactaaaaagaggcaactcctttttggtgcaaaaaaagcattcggactatgaaaacccgaatgcctg

SEQ ID NO: 32424 - DNA, 260 bp, Unknown
  Description of Unknown: RightRegion for integrase B6425 sequence
agaaccgagatctgcgccgttgggaccgtcgtgctgctcaggataccacgggcggcgtagcgacaccttttctcgagaaaaaacccgcccgggaaaacccgagcgggctgcggctaatgccggttgatgctcacgatgcagagcccgattgtcgccacggtgccgccgaagagcgcgccgaggacgaaggccaacgcgatcatgctagtacgggttgccgtcggtgacgcagacctgaaggcggtccagcggctcgccgt

SEQ ID NO: 32425 - DNA, 260 bp, Unknown
  Description of Unknown: RightRegion for integrase B6426 sequence
aaaaagatagtgttcgaccgggaaacccggcgttttacgttcttcttttacacctcataagttattgcagtttggcggccccgacggcgagatgggcgcatccatgcgctatctgtcccagcgctacgccatgccttataaagaaggcaaggctgttttgaccgatatcggcacagaggaactagcacatctggaaatgatcgccgccattgtccatcagctgacccggaacctcacagccgagcagctggtagaacagg

SEQ ID NO: 32426 - DNA, 260 bp, Unknown
  Description of Unknown: RightRegion for integrase B6427 sequence
acgaaagaatatacaaacgggagggcaggaaatgtcaatggaaaactgtgcaaacactaaacccaaaattacgattatcccagccaagacgagagtcgaacggcttgaccctatgtcggtagcgatgggacaaaagcctaaaatacgagtggctgcatatgcacgagtgtcgaccgaccacgaagaacaggagagcagttacgaggcacaggtagaccacttcaccaaactcattgcaagccatgatgattggacgatgg

SEQ ID NO: 32427 - DNA, 260 bp, Unknown
  Description of Unknown: RightRegion for integrase B6428 sequence
ctgattgataaagttgtagtcctcaatacagatgtcaccatttactggtctttctgctgatcatcctttaataccagcctgcagatagtttctacatttgcggtccaggggaactggtccacagcgcaggctttctctaccacatagccgccagccaggaaaacttccaagtctcttaccagactggtcggtttgcatgaaatgtaaatgatagttttgcacctaatagtggcaatgatcttcggcagtgccttggggtg

SEQ ID NO: 32428 - DNA, 260 bp, Unknown
  Description of Unknown: RightRegion for integrase B6429 sequence
gaaaagaccgagcgcggcacgggattgaacccacgcctgcgcgtgactctcaaaatctaaatgtttatcatcttgtgcccgatttatagggcacgcgatgataaacagccttacaaaacttataaatggtataaaaacggggaacctgcaagacaaacgggttcccctttttcgcgtcattccgcccgctgctagcctattctagcccacatgtagcagaccaaatatggcggcatattattgtggggcttgcctccacc

SEQ ID NO: 32429 - DNA, 112 bp, Unknown
  Description of Unknown: RightRegion for integrase B6430 sequence
ctaaaaagcaccgttgagccaatgctcttaggtgctaattttaataatggtggaggttaggagattcgaactcctgaccccctgcgtgcaaagcaggtgctctaccagctga

SEQ ID NO: 32430 - DNA, 260 bp, Unknown
  Description of Unknown: RightRegion for integrase B6431 sequence
gaaaagaccgagcgtggcacgggattgaacccccgcctgcgcgtaactcttagaatctaaatgtttatcatcgcgtgcccgatttatagggcacgcgatgataaacagacttacaaaacttataaatggtataaaacggggaacctgcaagacagcgggttcccttttttgtgttcagcttacccgctgccacatgtagcagaccaaatacggtggcatattattgtgtggcttgcctccaccagtcgatccagtcacac

SEQ ID NO: 32431 - DNA, 109 bp, Unknown
  Description of Unknown: RightRegion for integrase B6432 sequence
gtttatgacaaggcaaaagatgaaatacatattttcttctatcttctcgaccccttgtaaatcaaggatttgagcgttgttccccctatagatgtatggtggaccagat

SEQ ID NO: 32432 - DNA, 260 bp, Unknown
  Description of Unknown: RightRegion for integrase B6433 sequence
agaaccgagatctgcgccgttgggaccgtcgtgctgctcaggataccacgggcggcgtagcgacaccttttctcgagaaaaaacccgcccgggaaaacccgagcgggctgcggctaatgccggttgatgctcacgatgcagagcccgattgtcgccacggcgccgccgaagagcgcgccgagcacgaatgccagcgcgatcatcgacgggtaccgtcagacacgtagcattggagacggtcgagggcataaccgtagatg

SEQ ID NO: 32433 - DNA, 260 bp, Unknown
  Description of Unknown: RightRegion for integrase B6434 sequence
atgtatactagaacatctaagaaagaagattttaaactggatatctcctatcatcaatagcagcctcattttttgggttgctatttttattcatctattaattttcttatttgtcctccgccttcttctatttgctttttagattttagtagtctttccatatattctggattgttatatatatcctcattgcctactggtttccctgtatcccattcctcaaatttatattcaccctcaaaacctttgattaattcttt

SEQ ID NO: 32434 - DNA, 260 bp, Unknown
  Description of Unknown: RightRegion for integrase B6435 sequence
tataaacgtgaaaaatccgctcccgagggcgatatcttcttgaaaatctattataaataactttttacccgccttatgtatcttgttgccatagctgttgccatagcaatccataatattccggaagggattgctacgtctgtaccgatatactactcaacaggcagcagaaaaagagcatttatagtatcgtttttttctggtattacggaacctttaggtgctataatcggttatttaattttacgtccgtttttcaa

SEQ ID NO: 32435 - DNA, 260 bp, Unknown
  Description of Unknown: RightRegion for integrase B6436 sequence
gaaaagatagtatttgaccgggaaacccggagttttacgttcttttactacacatcataagttattacaatacggcgggccagaatgttataacttatgaggtttcttcctattatatagtatcattttaccattgacgtctgcgaggataggtattatactttaagtacattgtcgatgcaaatgcatcgtggatttaagctttattatattttttgttatgttgagtttcgactcatatgcggattttttccaaaaaa

SEQ ID NO: 32436 - DNA, 260 bp, Unknown
  Description of Unknown: RightRegion for integrase B6437 sequence
gaaaagaccgagcgcggcacgggattgaacccacgcctgcgcgtaactctcagaatctaaatgtttatcatcttgtgcccgatttatagggcacgcgatgataaacagacagagaatagaggcaaacataggcggatagcatagtgctacacgccttttttcgcgtgctttagcttactctcttccacatgtacaccacgaggtatggaggcatattgctgtgaggcttgccgccacccgtagcgccagtcacactaccc

SEQ ID NO: 32437 - DNA, 109 bp, Unknown
  Description of Unknown: RightRegion for integrase B6438 sequence
tataaacgtgaaaaatccgctcccgagggcgatattttcttgaaaatctattataaataacttttacccgccttatgtatcttgttgccatagatgtcgccatagcaat

SEQ ID NO: 32438 - DNA, 260 bp, Unknown
  Description of Unknown: RightRegion for integrase B6439 sequence
gaaaagaccgagcgcggcacgggattgaacccacgcctgcgcgtaactctcagaatctaaatgtttatcatcttgtgccagatttatagggcacgcgatgataaacagacagagaatatagacaaatataggcggatagtcgtatggctacccgccttttcgttatgcagttcgctgccacatgtacaccacgaggtacggcggcatattgctgtgaggcttgccgccgccagtcgcccccgtcacgccgccttggtcaa

SEQ ID NO: 32439 - DNA, 260 bp, Unknown
  Description of Unknown: RightRegion for integrase B6440 sequence
ctaactgataaagttgtggttctcaatgcaaatgtcacgatttactggtctttctgctgatcctcctttaataccagcctgcagatagtttctacgttcgcagtccagggaaactggtccactgcgcaggctttctctaccacatacccgccggccagaaaaacttccaagtctcttaccaagctggtcggtttgcacgaaatgtaaatgattgttttacacctaatagtggcaatgatcttcggcagtgctttggggtg

SEQ ID NO: 32440 - DNA, 260 bp, Unknown
  Description of Unknown: RightRegion for integrase B6441 sequence
aagattgtttatgataaaaacaccgataccttaaaggtctactacttctacaacccttgattttactggctttttcggtgtttgtacgttgttgcaatctggttgtcacagtggggttcaaagtctctggcagatcagggatacacagccacagaaatcctccgctactactatggtgacaacatctacatcaattcagcggaggagatttccgggattccttcttcctggcctggatacgatctcgacatcggggcaac

SEQ ID NO: 32441 - DNA, 260 bp, Unknown
  Description of Unknown: RightRegion for integrase B6442 sequence
aagcgtatcgaggtattacctgaacctgattctataaaaatctactggaaattcgtttaatatttttaccctaattgtatgtatggattcatggtggcgatcagttgaaagtctgccggaaacttgtggtagatcccatttctggtgatatcgatcgttccatcttccaatggctgtctgagtgcttcgatacattctgttttaaattccataaattcgtccagaaataaaatgccatgatgtgctaatgtgatctctcc

SEQ ID NO: 32442 - DNA, 260 bp, Unknown
  Description of Unknown: RightRegion for integrase B6443 sequence
aaacaacagttttctgcatttctgtctgatgatataatgagcacacagtgctcatcttaggagtttctccgaaactccattatgcgcagaaatcatgcgcaactattatgatataatatctatataacaaatgccgtattttaggcattttggggtaattgctactatccgagtatggtggtcctgacggcgaaattggtgcttccatgcgatatctgtcacagcgttattccatggaaaaccgcattgcggccggaacg

SEQ ID NO: 32443 - DNA, 260 bp, Unknown
  Description of Unknown: RightRegion for integrase B6444 sequence
aaacaacagttttctgcatttctgtctgatgatataatgagcacacagtgctcatcttaggagtttctccgaaactccattatgcgcagaaatcatgcacaactattatgatataatatctatataacaaatgccgtattttaggcattttggggcaattgctactatccgagtatggtggtcctgacggcgaaattggtgcttccatgcgatatctgtcacagcgttattccatggaaaaccgcattgcggccggaacg

SEQ ID NO: 32444 - DNA, 109 bp, Unknown
  Description of Unknown: RightRegion for integrase B6445 sequence
acacttatagataaggtctatgtttataaggaccgtatacatattaaatgggcgtactgatacgcccattttttgtatattttgtttctaatagttccacatcccactg

SEQ ID NO: 32445 - DNA, 260 bp, Unknown
  Description of Unknown: RightRegion for integrase B6446 sequence
aacaataccgctactatttcggatttggacttatcaagtccaccatgtgaattagggtaagagtattgcacagtttttcttagactgtctaatactcttattttttttatttcttttttccaagtagactcggggtgaatcatcggataaatgctaaccgttaaaaggggctgctggacaaaaacggaaaaaactttacctaaaaagggagaataaatcacttttgaactctctagtccaatcgttatttggacttttgc

SEQ ID NO: 32446 - DNA, 109 bp, Unknown
  Description of Unknown: RightRegion for integrase B6447 sequence
gacggcagttttaccgtaaatatcggcgtacatactagtggttgcggaggcaggatttgaacctacgaccttcgggttatgagcccgacgagctaccaactgctccact

SEQ ID NO: 32447 - DNA, 260 bp, Unknown
  Description of Unknown: RightRegion for integrase B6448 sequence
aaaattgtctatgaaaaggacaaggacttattaaaggtttattactactacatgccgtaaacccttgaaaacactgggtttgcgggtgtttgtaggttgttacaaaaaggtcatccaatcgggacagctcaccctggtaccatcacaatactgcgtcagaatcggctgccgtacattcggacgggacagatagtttgcaaaaatctcatccactaccgccgaaatcgtatcgtacacatttcgttccggaatccacttgt

SEQ ID NO: 32448 - DNA, 260 bp, Unknown
  Description of Unknown: RightRegion for integrase B6449 sequence
gacggaacagtgaccgtaaacttgggcgtacatattaatggttgcggggactggacttgaaccagcgaccttcgggttatgagtagtatattatattttactcacgctttcacactatatcatcaaaccgcataacaaagccattttcgcaactattacttttcatactttaccgtactttgtccgctatttttatatgtgtagcggacaaatagcggacagaatttttataaatcatttttttattgacaaccttattg

SEQ ID NO: 32449 - DNA, 260 bp, Unknown
  Description of Unknown: RightRegion for integrase B6450 sequence
aaaatcatctacgaaaaggataaggacttgttaaaggtttattactactacatgccgtaaacccttgaaaacactgggtttgcgggtgtttgtaggttgttacaaaaaggtcaacctttatgcaagggcatacaagtaatattcttacctattataataggataaaaatggtacaatattcacccctcagagagctaatctccgaggggggttttattaaatagatttaaccggttcacgatacaatgggttcatcagtc

SEQ ID NO: 32450 - DNA, 260 bp, Unknown
  Description of Unknown: RightRegion for integrase B6451 sequence
aagcgtattgagatattacctgaacccgactctataaaaatctattggaaattcgtttaacatttttaccctaattgcgggcatggattcatggtggcgatcagttgaaagtctgccggaaacttgtggtagatcccatttctggtgatatcgatcgttccatcttccagtggctgtctgagtgcttcgatacattctgttttaaattccataaattcgtccagaaataaaatgccatgatgtgctaatgtgatttctcc

SEQ ID NO: 32451 - DNA, 260 bp, Unknown
  Description of Unknown: RightRegion for integrase B6452 sequence
cggattgatcttgatggtgaaaacatagacattcattggagcttcgctcctgaatcgtgaggcgggtggcatacatggaaaagttacattttgaggtgtcgtcgccggaaagttttatcaagctggcctgcacgatgctttttgaaaaaagcgttgaatttagcgaatggggttccgtctggaacgagatgtttgctggcgtagagggcgaagagctgtttttgggatttgctgaagaacttttcccagctggctgcatc

SEQ ID NO: 32452 - DNA, 260 bp, Unknown
  Description of Unknown: RightRegion for integrase B6453 sequence
aaacaacaattttctgcatttctgtctgatgatataatgagcacacagtgctcatcttaggagtttctccgaaactccattatgcgcagaaatcatgcgcaactattatgatataatatctatataacaaatgccgtattttaggcattttggggcaattgctactatccgagtacggtggtcctgacggcgaaattggtgcttccatgcgatatctgtcacagcgttattccatggaaaaccgcattgcggccggaacg

SEQ ID NO: 32453 - DNA, 109 bp, Unknown; identical to SEQ ID NO: 32444
  Description of Unknown: RightRegion for integrase B6454 sequence

SEQ ID NO: 32454 - DNA, 260 bp, Unknown
  Description of Unknown: RightRegion for integrase B6455 sequence
gatcacatcgagtaccatcgagacagcgataccttcgacatcttctattcttattcctaaacagctttgtaagtgccgacttttcggcactttactcatctatcccttaacgtgacacggacctccgaactgtgaaatgatcacttttgccatctcagcatttgggcgagtgatatttaccgggtattgcaaacgtttttcatatttccacattgatcagcatcctccttcccatggccacggaccttctacccaggtcc

SEQ ID NO: 32455 - DNA, 260 bp, Unknown
  Description of Unknown: RightRegion for integrase B6456 sequence
aaacaacagttttctgcatttctgtctgatgatataatgaacacacagtgctcatcttaggagtttctccgaaactccattatgatataatatctatataacaaatgccgtattttaggcattttagggcaattgctactatccgagtacggtggtcctgacggcgaaattggtgcttccatgcgatatctgtcacagcgttattccatggaaaaccgcattgcggcaggaacgttgactgacatcggcaccgaagaatt

SEQ ID NO: 32456 - DNA, 260 bp, Unknown
  Description of Unknown: RightRegion for integrase B6457 sequence
ctggaatacagcaacggcgctccgggcaacaagcccggctggaacgtaaaggaggcataaccatggcaccggcattacgaagagtagtacgcaccatgccgcagatcgcggtcgtgcagatcgacgacaccccgcaggtaaagaaaacaaaggtcgcggcctacgcccgcgtatccactgagaaggaagaacaggaagatagctttgagagacaggtagagcactacacccacctgatcgagtcgaaccccgaatggacg

SEQ ID NO: 32457 - DNA, 109 bp, Unknown
  Description of Unknown: RightRegion for integrase B6458 sequence
aaaattgtctatgatcgagaagaagacgaacttaaagtatactactaccacatgccgtaaacccttgattttgctgggtttgttggacttttgtcggttgttgcaaaaa

SEQ ID NO: 32458 - DNA, 260 bp, Unknown
  Description of Unknown: RightRegion for integrase B6459 sequence
acacttatagataaggtctatgtttataaggaccgtatacatattaaatgggcgtactgatacgcccatttttttgtatattttgtttctaatagttccacatcccactgtatagcatagtaaccacacgcctttgcagcatccaatacagtatcattgtactctccaaaaggtggtctatacaggtttgcatctatacctaacaagtttttaatcttatcgtgacacccctgtatattctccttattttcctctaggga

SEQ ID NO: 32459 - DNA, 260 bp, Unknown
  Description of Unknown: RightRegion for integrase B6460 sequence
gatcacatcgagtaccatcgagacagcgataccttcgacatcttctattcttattcctaaacagctttgtaagtgccgacttttcggcactttactcatctatcccttaacgtgacacggacctccgaattgtgaaatgatcacttttgccatctcagcatttgggcgagtgatatttaccgggtattgcaaccgtttttcatatttccacattgatcaacatcctccttcccatggccacgggccttctacccaggtcc

SEQ ID NO: 32460 - DNA, 260 bp, Unknown
  Description of Unknown: RightRegion for integrase B6461 sequence
aaacaacagttttctgcatttctgtctgatgatataatgagcacacagtgctcatcttaggagtttctccgaaactccattatgatatttatataacaaatgccgtattttaggcattttggggcaattgctactatccgagtacggtggtcctgacggcgaaattggtgcttccatgcgatatctgtcacagcgttattccatggaaaaccgcattgcggccggaacgttgactgacatcggcaccgaggaattggccc

SEQ ID NO: 32461 - DNA, 260 bp, Unknown
  Description of Unknown: RightRegion for integrase B6462 sequence
aaagcgatatattttagtagattaaatgataaaatagtcttgaaagtcgtccttagatagacgggataacatgattattctaattcataagtaaatccttctccatcgacttcatgaacactatttacaataataaaagctcttggatctaactgcatgatttcgtgttctaaattcgaatacattttttgtggaattacaatcatcaatacaggtttggattcatttgtatatccacccttaccttctaaaattgtaac

SEQ ID NO: 32462 - DNA, 260 bp, Unknown
  Description of Unknown: RightRegion for integrase B6463 sequence
tggctcggtgttcgcgtttatagcgggcatctattttgtcgatgtttcccatcaggctgagcctggacgcacttcgcgttccgggctcagctttttgttttgccttttcactcacatttgcagcaggcatctatcttgtcagcatttcccagatgggtattatatgaacgcctactttttcaaaggcggctttgccgtaagggtgtggctgtgatgtcaacagtagagaatgggcaacaagattagtagtcttgttcccc

SEQ ID NO: 32463 - DNA, 260 bp, Unknown
  Description of Unknown: RightRegion for integrase B6464 sequence
gagcgtatcgaagtattacctgaacctgattctataaaaatctactggaaattcgtttaatattttaccctaattgtatgtatggattcatggtggcgatcagttgaaagtctgccggaaacttgtggtagatcccatttctggtgatatcgatcgttccatcttccaatggctgtctgagtgcttcgatacattctgttttaaattccataaattcgtccagaaataaaatgccatgatgtgctaatgtgatctctcct

SEQ ID NO: 32464 - DNA, 165 bp, Unknown
  Description of Unknown: RightRegion for integrase B6465 sequence
aaaattgtctatgatcgagaagaagacgaacttaaagtatactactaccacatgccgtaaacccttgattttgctgggtttgttggacttttgtcggttgttgcaaaaaggtcatccagtcgggacagctcaccctggtaccatcacaatactgcgtcagaatcg

SEQ ID NO: 32465 - DNA, 109 bp, Unknown
  Description of Unknown: RightRegion for integrase B6466 sequence
aaaataatctacgaaaaggacaaggacttgctaaaggtttattactactacatgccgtaaatccttgaaaacactgggtttgcgggtgtttgtaggttgttacaaaaag

SEQ ID NO: 32466 - DNA, 260 bp, Unknown
  Description of Unknown: RightRegion for integrase B6467 sequence
cggattgatcttgatggtgaaaacatagacattcattggagctttgctcctgaatcgtgaggcgggtggcatacatggaaaagttacattttgaggtgtcgtcgccggaaagttttatcaagctggcctgcacgatgctttttgaaaaaagcgttgaatttagcgaatggggttccgtctggaacgagatgtttgctggcgtagagggcgaagagctgtttttgggatttgctgaagaacttttcccagctggctgcatc

SEQ ID NO: 32467 - DNA, 109 bp, Unknown
  Description of Unknown: RightRegion for integrase B6468 sequence
aaaatcatctacgaaaaggataaggacttgttaaaggtttattactactacatgccgtaaacccttgaaaacactgggtttgctggtgtttgtaggttgttacaaaaag

SEQ ID NO: 32468 - DNA, 260 bp, Unknown
  Description of Unknown: RightRegion for integrase B6469 sequence
aaacaacagttttctgcatttctgtctgatgatataatgagcacacagtgctcatcttaggagtttctccgaaactccattatgatatctatataacaaatgccgtattttaggcattttggggcaattgctactatccgagtacggtggtcctgacggcgaaattggtgcttccatgcgatatctgtcacagcgttattccatggaaaaccgcattgcggccggaacgttgactgacatcggcaccgaggaattggccc

SEQ ID NO: 32469 - DNA, 260 bp, Unknown
  Description of Unknown: RightRegion for integrase B6470 sequence
acacttatagaaaaggtctatgtttataaggaccgtatacatattaaatgggcgtactaatacgcccatttttttgtgtatcttgtttctaatagttctacatcccactgtatagcatagtatccacacgcctttgctgcatctagtacagtatcattgtactctccaaaaggtggtctatacaggttggcatctatacctaacaagtttttaatcttctcgtgacacccctgtatattctccttattctcctctaggga

SEQ ID NO: 32470 - DNA, 260 bp, Unknown
  Description of Unknown: RightRegion for integrase B6471 sequence
cggattgatcttgaaggtgaaaacatagacattcattggagttttgctcctgaatcgtgaggcgggtggcatacatggaaaagttacattttgaggtgtcgtcgccggaaagttttatcaagctggcctgcacgatactttttgaaaaaagcgttgaatttagcgaatggggttccgtctggaacgagatgtttgctggcgtagagggcgaagagctgtttttgggatttactgaagaacttttcccagctggctgcatc

SEQ ID NO: 32471 - DNA, 183 bp, Unknown
  Description of Unknown: RightRegion for integrase B6472 sequence
aaacaacagtttactgcatttctgtctgatgatataatgagcacacagtgctcatcttaggagtttctccgaaactccattatgcgcagaaatcatgcgcaactattatgatataatatctatataacaaatgccgtattttaggcattttggggcaattgctactatccgagtatggtggtc

SEQ ID NO: 32472 - DNA, 260 bp, Unknown
  Description of Unknown: RightRegion for integrase B6473 sequence
aaacaacaatttactgcatttctgtctgatgatataatgagcacacagtgctcatcttaggcattttggggcaattgctactatccgagtatggtggtcctgacggcgaaattggtgcttccatgcgatatctgtcacagcgttattccatggaaaaccgcattgcggccggaacgttgactgacatcggcaccgaggaattggcccacttagagatggttgcaaccatcatctgccaattaaccaggaatcttaccccg

SEQ ID NO: 32473 - DNA, 109 bp, Unknown
  Description of Unknown: RightRegion for integrase B6474 sequence
gaactcccaggtagttggcagttcggagggattacgtttggtgggcgttacaagatttgaacttgtgacctcttccgtgtcagggaagcgctctccccctgagctaaac

SEQ ID NO: 32474 - DNA, 260 bp, Unknown
  Description of Unknown: RightRegion for integrase B6475 sequence
gatcacatggagtaccatcgagacagcgataccttcgacatcttctattcttattcctaaacctctttgtaagtgccgacttttcggcactttacttatctatcccttaacgtgacacggacctccgaactgtgaaatgatcacttttgccatctcagcatttgggcgagtgatatttaccgggtattgcaaacgtttttcatatttccacattgatcagcatcctccttcccatggccacggaccttctacccaggtcc

SEQ ID NO: 32475 - DNA, 260 bp, Unknown
  Description of Unknown: RightRegion for integrase B6476 sequence
cggattgatcttgatggcgaaaacatagacattcattggagctttgctcctgaatcgtgaggcgggtggcatacatggaaaagttacattttgaggtgtcgtcgccggaaagttttatcaagctggcctgcacgatgctttttgaaaaaagcgttgaatttagcgaatggggttccgtctggaacgagatgtttgctggcatagagggcgaagagctgtttttgggatttactgaagaacttttcccagctggctgcatc

SEQ ID NO: 32476 - DNA, 260 bp, Unknown
  Description of Unknown: RightRegion for integrase B6477 sequence
aaacaacaatttactgcatttctgtctgatgatataataagcacacagtgctcatcttaggagtttctccgaaactccattatgcgcagaaatcatgcgcaactattatgatataatatctatataacaaatgccgtattttaggcattttggggcaattgctactatccgagtatggtggtcctgacggcgaaattggtgcttccatgcgatatctgtcacagcgttattccatggaaaaccgcattgcggcaggaacg

SEQ ID NO: 32477 - DNA, 260 bp, Unknown
  Description of Unknown: RightRegion for integrase B6478 sequence
aaagagaagaaaaccaaaccccgcgacttcaccttggagctccagctccgcgatttttaaccaccatatttataaaacggtcagtcttatgacaaagactgcatcgaagacctccgggtttaccccaccgtcgggtcccagacctacatagacaacgccttcagcgtccggcccaagagcgccgagctgctgtacgccgaggtgaacgtcgaggccatcaccttcaacaagggctactacaccgttgacgtcacctattt

SEQ ID NO: 32478 - DNA, 260 bp, Unknown
  Description of Unknown: RightRegion for integrase B6479 sequence
aaacaacagttttctgcatttctgtctgatgatataatgagcacacagtgctcatcttaggagtttctccgaaactccattatgggcagaaatcatgcgcaactattatgatataatatctatataacaaatgccgtattttaggcattttggggcaattgctactatccgagcacggtggtcctgacggcgaaattggtgcttccatgcgatatctgtcacagcgttattccatggaaaaccgcattgcggccggaacg

SEQ ID NO: 32479 - DNA, 109 bp, Unknown
  Description of Unknown: RightRegion for integrase B6480 sequence
aaagtgatatattttagtagaatcaacgatgaaatagtcttgaaagttgtccttagatagacgggataacatgattattccaattcataagtaaatccttctccatcga

SEQ ID NO: 32480 - DNA, 260 bp, Unknown
  Description of Unknown: RightRegion for integrase B6481 sequence
aaagagaagaaaaccaaaccccgcgacttcaccctggagctccagctccgcgatttttaactgccatatttataaaacggtcagtcttatgacaaagactgcatcgaggacctgcgggtctatcccaccgtcggctcacagacctacatagacaacgccttcagcgtgaggcccaaaagcgccgagctgctgtatgcggaggtgaacgtcgaggccatcaccttcaacaaaggctattacaccgtggatgtgacctactt

SEQ ID NO: 32481 - DNA, 260 bp, Unknown
  Description of Unknown: RightRegion for integrase B6482 sequence
aaaattgtctatgatcgagaagaagacgaacttaaagtatactactaccacatgccgtaaacccttgattttgctgggtttgttggacttttgtcggttgttgcaaaaaggtcaaccttttctcaagagcgtacaattatttttctacctattataaagaagtaaaaatggtacaatattcacccctcagagaacgatctccgaggggattttattagaacaactggaatctatcgattgcctgtccgaacgctccagca

SEQ ID NO: 32482 - DNA, 109 bp, Unknown
  Description of Unknown: RightRegion for integrase B6483 sequence
aaaattgtctatgaaaaggacaaagacttattaaaggtttattactactacatgccgtaaacccttgtaaatactgggtttacgggtgtttgtaggttgttacaaaaag

SEQ ID NO: 32483 - DNA, 260 bp, Unknown
  Description of Unknown: RightRegion for integrase B6484 sequence
aaaatcatctacgaaaaggataaggacttgttaaaggtttattactactacatgccgtaaacccttgaaaacactgggtttgctggtgcttgtaggttgttacaaaaaggtcatccagtttggacaacttaccctgtttccatcgcagtactgcgtcaaaatcggctgtcttacattcgggcgggacaaatagtttgcaaaaatctcatccactaccgaagaaatcgtatcatagacattccgctccggaatccatttat

SEQ ID NO: 32484 - DNA, 260 bp, Unknown
  Description of Unknown: RightRegion for integrase B6485 sequence
aaagtgatatattttagtagaatcaatgatgaaatagtcttgaaagttgtccttagatagacgggataacatgattattccagttcataagtaaatccttctccatcgacttcatgaacactatttacaataataaaagctcttggatctaactgcatgatttcgtgttctaaattcgaatacattttttgtggaattacaatcatcaatacaggtttggattcatttgtatatccacccttaccttctaaaattgtaac

SEQ ID NO: 32485 - DNA, 260 bp, Unknown
  Description of Unknown: RightRegion for integrase B6486 sequence
acacttatagagaaggtctatatttataaggaccgtatacatattaaatgggcgtattagtacgcccattttgtatattttgtttctaatagttccacatcccactgtatagcatagtatccacatgcctttgctgcatctagtacagtatcattatactccccaaaaggtggtctgtacaggttggcatctatacctaacaagtttttaattttctcgtgacacccctgtatattctccttattctcctccagtgataa

SEQ ID NO: 32486 - DNA, 260 bp, Unknown
  Description of Unknown: RightRegion for integrase B6487 sequence
aaacaacagttttctgcatttctgtctgatgatataatgagcacacagtgctcatcttaggagtttctccgaaactccattatgcgcagaaatcatgtgcaactattatgatataatatctatataacaaatgccgcattttaggcattttggggcaattgctactatccgagtatggtggtcctgacggcgaaattggtgcttccatgcgatatctgtcacagcgttattccatggaaaaccgcattgcggccggaacg

SEQ ID NO: 32487 - DNA, 260 bp, Unknown
  Description of Unknown: RightRegion for integrase B6488 sequence
gataaaatagtaatgctgaatgatgagataactattcactggtcattctgtcagaactaattctacaactgtttcaacgtgagaagtcgcaggaaacatgtctacgcaacaaactctttttactttgtatcctctctcttgcaggataatgaggtcacgtgcaagtgaagttggcttgcaggagacatagattaactttgttgccctaatagaatcactgattttatccaatgccttaggatgaataccatctcttggcg

SEQ ID NO: 32488 - DNA, 260 bp, Unknown
  Description of Unknown: RightRegion for integrase B6489 sequence
aaaatcatctacgaaaaggataaggacttgttaaaggtttattactactacatgccgtaaacccttgaaaacactgggtttgtgggtgtttgtaggttgttacaaaaaggtcaaccttttttcaacagcgtacaaataatatccctacctattataatacaatgaaaatggtacaatattcatgccggcaactgcggtctaccggcacttaaataaccagcccgtaaaaaggtgtgcatcatttcggttgtcagagtcat

SEQ ID NO: 32489 - DNA, 260 bp, Unknown; identical to SEQ ID NO: 32455
  Description of Unknown: RightRegion for integrase B6490 sequence

SEQ ID NO: 32490 - DNA, 260 bp, Unknown
  Description of Unknown: RightRegion for integrase B6491 sequence
aaagtgatatattttagtaaaatcaatgatgaaatagtcttgaaagtcgtccttagatagacgggataacatgattattccaattcataagtaaatccttctccatcgacttcatgaacactatttacaataataaaagctcttggatctaactgcatgatttcgtgttctaaattcgaatacattttttgtggaattacaatcatcaatacaggtttggattcatttgtatatccacccttaccttctaaaattgtaac

SEQ ID NO: 32491 - DNA, 260 bp, Unknown
  Description of Unknown: RightRegion for integrase B6492 sequence
aaagtgatatattttagtagaatcaacgatgaaatagtcttgaaagtcgtccttagatagacgggataacatgattattccaattcaaatgtatatcattgtatttccgctacttaagtatatcagaacaaaggaaaaaagcctacagaaaatagtattccgtaggccttttttagtacattttgtatgtttttaaactgtatatgataccttttataagaatcttccataaggtgaagtgttgatacctttggcattta

SEQ ID NO: 32492 - DNA, 260 bp, Unknown
  Description of Unknown: RightRegion for integrase B6493 sequence
acacttatagataaggtctatgtttataaggaccgtatacatattaaatgggcgtactgatacgcccattttttgtgtgtattttgtttctaatagttccacatcccactgtatagcatagtatccacacgcctttgctgcatctagtacagtatcattgtactctccaaaaggtggtctatacaggttggcatctatacctaacaagtttttaatcttctcgtgacacccctgtatattctccttattctcctccagtg

SEQ ID NO: 32493 - DNA, 260 bp, Unknown
  Description of Unknown: RightRegion for integrase B6494 sequence
aaaatgcttatcgacaaagtaattctaacagatgataaaatagaaatatcctataaatagcccttttacgggctatttattatttttctctattaattcatgttcagaaaatttaagtttccctgctttataatctgccatcttttgttccaaatacctaatattgttctccgaataaaaccggtctattgcaacatcaaaaggtatgcgtttttccctgcctactttttttgcaaaaatcgtaaaagccgccgtcatag

SEQ ID NO: 32494 - DNA, 260 bp, Unknown
  Description of Unknown: RightRegion for integrase B6495 sequence
gaccatatggagtaccaccgcgacagcgatacttttaacatcttctattcttattcctaaatctctttgaaagtgccgattattcggtacttttcattttcatcccttaacgtgacacggacctccgaattgtgaaataatcacttttgccatctcagcatttgggcgagtgatatttaccgggtattgcaaccgtttttcatatttccacattgatcaacatcctccttcccatggccacgggccttctacccaggtcc

SEQ ID NO: 32495 - DNA, 260 bp, Unknown; identical to SEQ ID NO: 32492
  Description of Unknown: RightRegion for integrase B6496 sequence

SEQ ID NO: 32496 - DNA, 137 bp, Unknown
  Description of Unknown: RightRegion for integrase B6497 sequence
gagcgtatcgaagtattacctgaacctgattctataaaaatctactggaaattcgtttaatatttttaccctaattgtatgtatggattcatagtggcgatcagttgaaagtctgccggaaacttgtggtagatccc

SEQ ID NO: 32497 - DNA, 260 bp, Unknown
  Description of Unknown: RightRegion for integrase B6498 sequence
tcttctattaacaagataatgatcactaaagatggaatccaagaaattgaatttaattaaaaatagagttaagaccgaaatcttaactcttttatattgggctttttgtagtagcgtccaccaatattactaatataaacaatactagaataaatgcgaatccgccaccattttggttaactccgccattatttccttggcaacaagtatttgacaaaatatcacctcgatatattttatgcaaggtttactattttggt

SEQ ID NO: 32498 - DNA, 260 bp, Unknown
  Description of Unknown: RightRegion for integrase B6499 sequence
aaaaagattgtatttgaccgaaaaactagcgtgtttacattcttttattatgtatcatgagtttttacagtcaagtcctccatactgactcatgataaacatggccatcttcgcatttggttctttaatatttacaggaaattccagtctcttttcatagatccacattaataaccgcctccttcccatggccacgggtcgtctgtccaggaccagtagactgtatctctggcattttcagcacgaaggggaccatactg

SEQ ID NO: 32499 - DNA, 109 bp, Unknown
  Description of Unknown: RightRegion for integrase B6500 sequence
cattttgtttatgataaggaaaaggataaactggaagtgtacttcttcatgcagaaataatggattattgaatattctaatatgttacatataaacagtgaaagccgca

SEQ ID NO: 32500 - DNA, 260 bp, Unknown
  Description of Unknown: RightRegion for integrase B6501 sequence
cattttgtttatgataaagaaaaggataaacttgaagtgtacttcttcctgcaggaataataaaagagtgaggataactattcctcactcttttgttcaccttttctcagcatattcaaagtagcaattgcctctttgataaactgataaaagtacataaatgccacaattcctaataaaataatactaaatatcaatgtacttatattagtatttattggaactacttgttttatagttactaatagctctgttatctg

SEQ ID NO: 32501 - DNA, 260 bp, Unknown
  Description of Unknown: RightRegion for integrase B6502 sequence
aaaaagatcgtttttgaccgtaaaaccggtacttttaccttcttctactacacattatgaggttttgcaatacagcccaccatactgtaaaaactcatgatacttctataaggcagtctgaaaaggctgcctttaataattcctggaagtaatgcttgcaaaatcttcttcaactacccttttcaatagtaatattggcaattttaatgatcgaatttacttcaaagaaacgggtagcggtaacactttcagcataaaaa

SEQ ID NO: 32502 - DNA, 260 bp, Unknown
  Description of Unknown: RightRegion for integrase B6503 sequence
cattttgtctatgataaggaaaaggataaactggaagtgtacttcttcctacaaaaataggggaggcaatcagcactcccctattttttcaattatattttatgttatttatactacaactaatactactatcattaacaagtgatatataattttgaacaactcttttattaacaagaagatttgcattacacctgttaagtatttctattatcttttctttttctttgctgttaattggatatgactttaatggttct

SEQ ID NO: 32503 - DNA, 260 bp, Unknown
  Description of Unknown: RightRegion for integrase B6504 sequence
tattccaagattgacaacaatattaaaataacaatatatagcaaactccctataaagtaattttgcaactgtagtgtacctaggaattggctcatatcgaaattgtaggtgctatgtgtttacagcttagtgaaaatgccgaccctgaggaaattaaggctgctggttttgattcttattttgtagaccatggaactggtgtatatccttgtagtgcttctggcgtgcctttcaacgcagcttgccttgcatcaaaagga

SEQ ID NO: 32504 - DNA, 260 bp, Unknown; identical to SEQ ID NO: 32500
  Description of Unknown: RightRegion for integrase B6505 sequence

SEQ ID NO: 32505 - DNA, 260 bp, Unknown
  Description of Unknown: RightRegion for integrase B6506 sequence
aaaaagattgtatttgaccgaaaaactagcgtgtttacattcttttattatgtatcatgagtttttacagtcaagtccaccatactgtaaaaactcatgataatatcattcaactattactgcaataaaaaatacggaaacaatgcaagcattgtctccgcggaaaacatatgtttttgttctgttgaaaatttttcaccgtccaactggtttataattctttctaagcaattgaattataacacagtgtatgtactctc

SEQ ID NO: 32506 - DNA, 260 bp, Unknown
  Description of Unknown: RightRegion for integrase B6507 sequence
aaaaagattgtatttgaccgaaaaactagcgtgtttacattcttttattatgtatcatgagtttttacagtcaagcccaccatactgtaaaaactcataataatatcattcaactattgctgcaataaaaaatacggaaacaatgcaggcattgtctccgcggaaaacatatgtttttgttctgctgtaagtgtttccactgtccaactggttataattccttctagacaatcgaattatagcacagtggatgcactctc

SEQ ID NO: 32507 - DNA, 260 bp, Unknown
  Description of Unknown: RightRegion for integrase B6508 sequence
catatggtatatgacagggaaaatgataagctggaaatatacttcttcctgcaaaaataaaaaagagtcttctatataccatagaagactcttttatcaattcgttcttttttatttatctttgcttttttccttatcagttgtctgttccttatctgaaggatagtcaaagatgctttctaaatcaaatcccatatcctacctcctttgaaaccttttctcttgttcatttgctagtatagactaatccgttttaaatg

SEQ ID NO: 32508 - DNA, 260 bp, Unknown
  Description of Unknown: RightRegion for integrase B6509 sequence
ttaatcaataaaattgttatctacccggatttaatcgaaatccgctgggctttccactagattagtacattccgccggcctgtggctgtgcttgtaaaccttgagctggctccttgatgtcagctcaaggtttaccaatctatcgcatccgaacttcgatacatattatataggaaagaacgaaaaatgcaaacactaatcagtacgttttaaaacatccaaaattgaaatctgaaatgctgatcctctaaacgcatagg

SEQ ID NO: 32509 - DNA, 260 bp, Unknown
  Description of Unknown: RightRegion for integrase B6510 sequence
cattttgtttatgataaggaaaaggataaactggaagtgtacttcttcatgcagaaataatggattattgaatattctaatatgttacatataaacagtgaaagccgcaaacacagtgtttatgcgactttcactattgtataccttattgaagtatggtggaccagacggagaattaggggcgtctatgcgctatatttcacaacgatattctatgccttacagagaagtatcaggactacttacagatataggtacag

SEQ ID NO: 32510 - DNA, 260 bp, Unknown; identical to SEQ ID NO: 32503
  Description of Unknown: RightRegion for integrase B6511 sequence

SEQ ID NO: 32511 - DNA, 260 bp, Unknown; identical to SEQ ID NO: 32500
  Description of Unknown: RightRegion for integrase B6512 sequence

SEQ ID NO: 32512 - DNA, 260 bp, Unknown
  Description of Unknown: RightRegion for integrase B6513 sequence
tcgaataaaaccaagacctttcggtgttcggatttgagcggtcaagctccaccaatttgattgcaggtcgaaccctggagcagttcggcgaaaaaatcacccgctccgccaaaatcctgcacattcgtgtgggattttcctttattatttaccgcgccccggcagctgcaccgcaggggcgagatacacacgacgtaaggaggtaaccctatgaaagaggtcaaatcaccaaaaaagcccttgatctactactacggcat

SEQ ID NO: 32513 - DNA, 195 bp, Unknown
  Description of Unknown: RightRegion for integrase B6514 sequence
catatggtatatgacagggaaaatgataagctggagatatacttcttcctgcatatgtaattttacatattagcagcttttaacaaaagcactgcaaagccacttaaatactggctttgtgacatagtataccttattgaagtatggtggacccgatggcgagcttggcgcatctatgcgatatatttcccagag

SEQ ID NO: 32514 - DNA, 260 bp, Unknown
  Description of Unknown: RightRegion for integrase B6515 sequence
cattgtgtgtatgataaagaaaatgataagctggaagtgtatttcttcttgcaaaaatagaagggaactttcccttctatttttaatcagtatatattgtatcattattttcttctattgtttgaacttgatctacatctattctatcgtctttgttataacaataaaatgctgccaatgcaattattattaaagcgatagaaaaagcaataataaccctatatttcctatctaattgtccatgaatacttcttataaaa

SEQ ID NO: 32515 - DNA, 260 bp, Unknown; identical to SEQ ID NO: 31982
  Description of Unknown: RightRegion for integrase B6516 sequence

SEQ ID NO: 32516 - DNA, 260 bp, Unknown
  Description of Unknown: RightRegion for integrase B6517 sequence
aaaaagattgtatttgaccgaaaaactagcgtgtttacattcttttattatgtatcatgagtttttacagtcaagccctccatactgactcataataaacatggccatcttcgcatttggttctttaatatttacaggaaattccagtctcttttcatagatccacattaataaccgcctccttcccatggccacgggtcgtctgtccaggaccagtagactgtatctctggcattttcagcacgaaggggaccatactg

SEQ ID NO: 32517 - DNA, 260 bp, Unknown
  Description of Unknown: RightRegion for integrase B6518 sequence
tcttctattaacaagataatgatcactaaagatggaatccaagaaattgaatttaattaaaaaatagagttaagaccgaaatcttaactcttttatattgggctttttgtagtagcgtccaccgaaaataccaatggataaaaaatattgattactaacagtacaatagaaataagtccaattgttcggtaaatatttctgcgtatattagaaaatgtgatattcatatgtaccattatgaatttagcccacaaatatcc

SEQ ID NO: 32518 - DNA, 260 bp, Unknown
  Description of Unknown: RightRegion for integrase B6519 sequence
aaaaagattgtatttgaccgaaaaactagcgtgtttacattcttttattatgtatcatgagtttttacagtcaagccctccatactgactcatgataaacatggccatcttcgcatttggttctttaatatttacaggaaattccagtctcttttcatagatccacattaataaccgcctccttcccatggccacgggtcgtctgtccaggaccagtagactgtatctctggcattttcagcacgaaggggaccatactg

SEQ ID NO: 32519 - DNA, 109 bp, Unknown
  Description of Unknown: RightRegion for integrase B6520 sequence
aaaaagatcgtttttgaccgtaaaaccggcacttttactttcttttactacacattatgaggttttgcattacggccctccatactgactcatgataaacatggccatc

SEQ ID NO: 32520 - DNA, 260 bp, Unknown
  Description of Unknown: RightRegion for integrase B6521 sequence
tattctaaaattgacaacaatattgaaataacaatatatagtaaaattcccataaaataattttacaactgtagtgtacctaggaattggctcatattgaaattgtaggtgctatgtgcttacagcttagtgaaaatgctgaccctgaagaaattaaggctgccggttttgactcctatttcgtagaccatggaactggtgtatatccttgtagcgcttctggcgtgcctttcaatgcagcttgccttgcatcaaaaggt

SEQ ID NO: 32521 - DNA, 260 bp, Unknown
  Description of Unknown: RightRegion for integrase B6522 sequence
tctataagaggggttattaataaagtagtttgggatgggaaaaacataataatttcataactgtttaaagacacctcgtactcctggtgccccgattgcaaacacccctaataatactataaataatatcatagttggtaaactcggaatcttaccatataaaatttgagatactgtcattacaaagaatacttctgtaagaactgaaccacataaatgtatgtttgaacataatggtattgcaaaatccactatatctt

SEQ ID NO: 32522 - DNA, 260 bp, Unknown
  Description of Unknown: RightRegion for integrase B6523 sequence
aaaaagatcgtttttgaccgtaaaaccggcacttttactttcttttactacacattatgaggttttgcattacggcccaccatactgtaaaaactcatgataatatcattcaactattgctgcaataaaaaatacggaaacaatgcaggcattgtctccgcggaaaacatatgtttttgttctgctgtaagtgtttccactgttcaactggttataattccttctagacaatcgaattatagcacagtggatgcactctc

SEQ ID NO: 32523 - DNA, 260 bp, Unknown; identical to SEQ ID NO: 32505
  Description of Unknown: RightRegion for integrase B6524 sequence

SEQ ID NO: 32524 - DNA, 260 bp, Unknown
  Description of Unknown: RightRegion for integrase B6525 sequence
ggacagtctggaaataagaaaggctggaatttaaataaacaaagaaaggagcaaaattaatgtcaacaccacaaagagttgtaagggaaatacctgcactatatcgtggcaacatgagtaaagtaactgaaaaagaaaatgtcacatattatgcaagagtttcaacagatcatgatgagcaagaagaatcgtatgaaagacagcgttcacactttgagcagttaataaaagcacaccccgaatggaattatgttgaggga

SEQ ID NO: 32525 - DNA, 103 bp, Unknown
  Description of Unknown: RightRegion for integrase B6526 sequence
agacagatcaaactgtctctcggtgtcgtacattttgcgagtagcgggaactggatttgaaccagcgacaccacgggtatgaaccgtgtgctctagccaactg

SEQ ID NO: 32526 - DNA, 260 bp, Unknown
  Description of Unknown: RightRegion for integrase B6527 sequence
gccgatatttttgcagccttcggttcggattcgcgggctggcgcttcaccatatgtatagtacttgcaggatgcttgatggcctgcaatatctcatatttgcgtggagtataccacgcgcttaaaagagagctgccaatgtgcagctctttcttttattattttacctcattgcattcttgtcctcttgcatcgttgatgaactgtataaatttaacggaattttagctgacaaaaccatactattgtggtattgtatcc

SEQ ID NO: 32527 - DNA, 260 bp, Unknown
  Description of Unknown: RightRegion for integrase B6528 sequence
aaaaagattgtatttgaccgaaaaactagtgtgtttacattcttttattatgtatcatgagtttttacagtcaagcccaccatactgtaaaaactcatgataatatcattcaactattactgcaataaaaaatacggaaacaatgcaggcattgtctccgcggaaaacatatgtttttgttctgctgtaagtgtttccactgtccaactggtttatagttctttctaagcaattgaattatagcacagtggatgcactct

SEQ ID NO: 32528 - DNA, 260 bp, Unknown; identical to SEQ ID NO: 32503
  Description of Unknown: RightRegion for integrase B6529 sequence

SEQ ID NO: 32529 - DNA, 260 bp, Unknown
  Description of Unknown: RightRegion for integrase B6530 sequence
cattttgtctatgataaggaaaaggataaactggaagtgtacttcttcctacaaaaatagaaaagagtcttctatataccatagaagactcctttatcaattcgttcttttttatttatctttgcttttttccttatcagttgtctgttccttatctgaaggatagtcaaagatgctttctaaatcaaatcccatatcctacctcctttgaaaccttttctcttgttcatttgctagtatagactaatccgttttaaatg

SEQ ID NO: 32530 - DNA, 260 bp, Unknown
  Description of Unknown: RightRegion for integrase B6531 sequence
aaaaagattgtatttgaccgaaaaactagtgtgtttacattcttttattatgtatcatgagtttttacagtcaagcccaccatactgactcattataaacatcgccattttcgcatttggctctttaatatttacaggaaattccagtctcttttcatagatccacattaataaccgcctccttcccatggccacgggtcatctgtccaggaccagtagactgtatcttttgcattttcagcacgtaacggcccatactg

SEQ ID NO: 32531 - DNA, 260 bp, Unknown
  Description of Unknown: RightRegion for integrase B6532 sequence
aatttttttgctcatttaagtataccacttagcgacccgtgtgtcatggccttgtcgtagatggcctgcagctcttctttgctgaactggtagcgctcgttgcagaagtggcagcagacttcggcatgaccgtcctcaatgagggactcgaggtcggacttgccgaggctcagcaggacttcgctgatgcgctccttcgagcacgggcagcggaaggcgagctcggtcgtcgtcaggtagtcgacggcaaagccctgcaa

SEQ ID NO: 32532 - DNA, 260 bp, Unknown
  Description of Unknown: RightRegion for integrase B6533 sequence
tcttctattaacaagataatgatcactaaagatggaatccaagaaattgaatttaattaaaaaatagagttaagaccgaaatcttaactcttttatattgggctttttgtagtagcgtccaccaatattactaatataaacaatactagaataaatgcgaatccgccaccattttggttaactccgccattatttccttggcaacaagtatttgacaaaatatcacctcgatatattttatgcaaggtttactattttgg

SEQ ID NO: 32533 - DNA, 260 bp, Unknown
  Description of Unknown: RightRegion for integrase B6534 sequence
ctaatagataagattgtggttcttaatcgcgatgtaactatctactggtcattctcttaagggcacagatagtctcaacatgataagtgttgggaaacatatcgacgcaggctatcttttcaacgtgatagccgccttcctgcagtagcttcaggtctctcgcaaggcttgaaggcttgcaggaaatgtaaatcattctatctaccctaaacatatctattatcttgataattgatatgtttagggtagacacctaaagg

SEQ ID NO: 32534 - DNA, 260 bp, Unknown; identical to SEQ ID NO: 32505
  Description of Unknown: RightRegion for integrase B6535 sequence

SEQ ID NO: 32535 - DNA, 260 bp, Unknown
  Description of Unknown: RightRegion for integrase B6536 sequence
aaaaagattgtatttgaccgaaaaactagcgtgtttacattcttttattatgtatcatgagtttttacagtcaagcccaccatactgtaaaaactcatgataatatcattcaactattactgcaataaaaaatacggaaacaatgcaagcattgtctccgcggaaaacatatgtttttgttctgttgaaaatttttcaccgtccaactggtttataattctttctaagcaattgaattataacacagtgtatgtactctc

SEQ ID NO: 32536 - DNA, 109 bp, Unknown
  Description of Unknown: RightRegion for integrase B6537 sequence
tcaattagaaaggtaattaataagattacttggacaggtgaaaatataattatttcataactgtttaagtccaccccgaactcctggtgcccctattgcaaatactcct

SEQ ID NO: 32537 - DNA, 260 bp, Unknown
  Description of Unknown: RightRegion for integrase B6538 sequence
tcttctattaacaagataatgatcactaaagatggaatccaagaaattgaatttaattaaaaaatagagttaagaccgaaatcttaactcttttatattgggctttttgtagtagcgtccaccaatattactaatataaacaatactagaataaatgagaatccgccaccattttggttaactccgccattatttccttggcaacaagtatttgacaaaatatcacctcgatatattttatgcaaggtttactattttgg

SEQ ID NO: 32538 - DNA, 260 bp, Unknown
  Description of Unknown: RightRegion for integrase B6539 sequence
aaaaagatcgtatttgaccgcaaaaatggcgtatttacattcttttactatgtatcatgagtttttgcaatctagcccaccatactgactcattataaacatcgccattttcgcatttggctctttaatatttacaggaaattccagtctcttttcatagatccacattaataaccgcctccttcccatggccacgggtcatctgtccaggaccagtagactgtatcttttgcattttcagcacgtaacggcccatactg

SEQ ID NO: 32539 - DNA, 260 bp, Unknown
  Description of Unknown: RightRegion for integrase B6540 sequence
ctaatcaataaaattgttatctacccggatttaatagaaatccactgggctttccactaattagtacattccgccggcctgtggctgtgctggtaaaccttgagccggctccttgatgtctgctcaaggtttaccaatttatcatccgtttcaaactgcttacgatataataccacatttaatatagaagaaataggctaaatcacataaaaaaagagacttatggatcggatgctaaactatatagtgatctgagccct

SEQ ID NO: 32540 - DNA, 109 bp, Unknown
  Description of Unknown: RightRegion for integrase B6541 sequence
catatggtatatgacagggaaaatgataagctggagatatacttcttcctgcatatgtaattttacatattagcagcttttaacaaaagcactgcaaagccacttaaat

SEQ ID NO: 32541 - DNA, 260 bp, Unknown; identical to SEQ ID NO: 32497
  Description of Unknown: RightRegion for integrase B6542 sequence

SEQ ID NO: 32542 - DNA, 109 bp, Unknown; identical to SEQ ID NO: 32536
  Description of Unknown: RightRegion for integrase B6543 sequence

SEQ ID NO: 32543 - DNA, 109 bp, Unknown
  Description of Unknown: RightRegion for integrase B6544 sequence
catattgtatatgacagggaaaatgataagctggagatatacttcttcctgcatatgtaattttacatattagcagcttttaacaaaagcactgcaaagccacttaaat

SEQ ID NO: 32544 - DNA, 260 bp, Unknown
  Description of Unknown: RightRegion for integrase B6545 sequence
ctaatcaataaaattgttatctacccggatttaatagaaatccactgggctttccactaattagtacattccgccggcctgtggctgtgctggtaaaccttgagccggctccttgatgtcgactcaaggtttactaattaatcatccgtttcaaactgcttacgatataataccacacttaatatagaagaaataggctaaatcacattaattgagtgcgtccctataaatctctcgcctataattccggttataggagg

SEQ ID NO: 32545 - DNA, 260 bp, Unknown
  Description of Unknown: RightRegion for integrase B6546 sequence
tctataagaggtattattaacaaggtagtttgggatggaaaaaacataataatttcataactgtttaaagacacctcgtactcctggtgcccctattgcaaatactcctaataatactataaataatatcatagttggtaaactaggaattttaccatataaaatttgagatactgtcattacaaaaaatacttctgtaagaactgaaccacataaatgtatgtttgaacataatggtattgcaaaatccactatatctt

SEQ ID NO: 32546 - DNA, 260 bp, Unknown
  Description of Unknown: RightRegion for integrase B6547 sequence
cattgtatttacgacaaagaaaatgataaattagaagtttatttctttttacaaaaatagagggggtagaagcctcctctatttttaatctgtataactaatatccgattcttcttgcactgttggtatttccgtattatcaatattatcattcttatcataaaagcaaaatgctattccagctataattatcaaaaccgatgataaagctattataacaccatattttctctttgcttgaccatgaatactcctaacaa

SEQ ID NO: 32547 - DNA, 109 bp, Unknown
  Description of Unknown: RightRegion for integrase B6548 sequence
gtaaatgttatggtgtatgataaggcggaggatacgttaagcgtggagttttacatataattttttactatatcaaaatgaagtacagtcctccgtattgactgataat

SEQ ID NO: 32548 - DNA, 260 bp, Unknown
  Description of Unknown: RightRegion for integrase B6549 sequence
gtaaatgttatggtgtatgataaggcggaggatacgttaagcgtggagttttacatataattaaactgccgtttcttttatttttcaagaaacggcagtttataattttcttattcaaattcttgttgttctaacaattcattctctatttgtgataattcttctgtaccatctacctcctcattatcttctttaaaacgtgcaatttccctatctattctatccatttctatttttattttatcttgcatttcattgct

SEQ ID NO: 32549 - DNA, 109 bp, Unknown
  Description of Unknown: RightRegion for integrase B6550 sequence
catatggtatatgataaagaaaatgataaattggaagtgtacttcttcctgcaaaaataaatagcaaacattttacttactatatttttaccaagttgtcaaacccgca

SEQ ID NO: 32550 - DNA, 109 bp, Unknown
  Description of Unknown: RightRegion for integrase B6551 sequence
gtaaatgttatggtgtatgataaggcggaggatttgttgagcgtggaattttacatatgattttttactatatcaaaatgaagtacagtcctccgtattgactgataat

SEQ ID NO: 32551 - DNA, 109 bp, Unknown
  Description of Unknown: RightRegion for integrase B6552 sequence
aaaaaaattgtatttgaccgtgaaagtggcgtttttacgttcttttactatgtatcatgagtttttgcagtcaggtcctccatactgactcatgataaacatggccatc

SEQ ID NO: 32552 - DNA, 109 bp, Unknown
  Description of Unknown: RightRegion for integrase B6553 sequence
cattgtgtgtatgataaggaaaatgataagctggagatatacttctttctgcaaaaataaatagcaaacattttacttgctatattttttcaaagttatcaaacccgca

SEQ ID NO: 32553 - DNA, 109 bp, Unknown; identical to SEQ ID NO: 32549
  Description of Unknown: RightRegion for integrase B6554 sequence

SEQ ID NO: 32554 - DNA, 109 bp, Unknown
  Description of Unknown: RightRegion for integrase B6555 sequence
tatagtaaattgtccgcctgctttgcagggttcgacaaacgtaacttttggtggagatgaggggagtcgaacccctgtccgaaaatattgccatacaactttctccgag

SEQ ID NO: 32555 - DNA, 109 bp, Unknown
  Description of Unknown: RightRegion for integrase B6556 sequence
gagcggatgtgctgcaataagcgccattctgatatgcagctgcatgttgtttttttataacctgttatgtacaaggagaatataagaacaaactccaattccccgtcaa

SEQ ID NO: 32556 - DNA, 260 bp, Unknown
  Description of Unknown: RightRegion for integrase B6557 sequence
gagcggatgtgctgcaataagcgccattctgatatgcagttgcatgttgtttttttataatttattatgtacaagaagaatataagaacaaactccaattccccgttaatatcaaaacccccaatgcaaaaaccgcaaagtatatcatagatgctctgggcggcccggatggtgagctgggcgcatccatgcggtatatgcatcagcggtatattatgaaacagaaccgcgtcaagggcactttgacagatattgccacg

SEQ ID NO: 32557 - DNA, 109 bp, Unknown
  Description of Unknown: RightRegion for integrase B6558 sequence
cattgtgtgtatgataaggaaaatgataagctggagatatacttctttttacaaaaataaatagcaaacattttacttactatatttttaccaagttatcaaacccgca

SEQ ID NO: 32558 - DNA, 260 bp, Unknown
  Description of Unknown: RightRegion for integrase B6559 sequence
cattgtgtgtatgataaggaaaatgataagctggagatatacttctttttacaaaaataaatagcaaacattttacttgctatattttttcaaagttatcaaacccgcatatatactggtttttcaacagtataccttattgaagtatggtggaccggacggcgagcttggtgcttctatgcgttacatctcgcaaagatattctatgccatacagggaagttgccgggctgcttacagatatcggcactgaggagctgg

SEQ ID NO: 32559 - DNA, 260 bp, Unknown
  Description of Unknown: RightRegion for integrase B6560 sequence
attaacgaactatataaaagttcgcaccttaactcatgcggttcaccatatgatttataaaattaaagcaactatcaatgatagttgctttttgttttttgcttaataaaattttatttaccataaaattaccagctaaaaataaacaaaactcctctaaagcttgaaaattaaacctttttataaaatctccaaaaatcctattatcgctggtaaaaaacaactaaaatccttgtgtatcaatacttttaatagtataa

SEQ ID NO: 32560 - DNA, 260 bp, Unknown
  Description of Unknown: RightRegion for integrase B6561 sequence
attaacgaattatataaaagttcgcaccttaactcatgcggttcaccatatgatttataaaattaaagcaactatcaatgatagttgctttttgttttttgcttaataaaattttatttatcataaaattaccagctaaaattaagaaaaactcctctaaagcttgaaaattaaacctttttataaaatctccaaaaatcctattatcgctggtaaaaaataactaaaatccttgtatatcaatacttttaatagtataa

SEQ ID NO: 32561 - DNA, 260 bp, Unknown
  Description of Unknown: RightRegion for integrase B6562 sequence
cattgtgtgtatgataaggaaaatgataagctggagatatacttctttttacaaaaataaatagcaaacattttacttactatatttttaccaagttgtcaaacccgcatatatgctggtttttcagcagtataccttattgaagtatggtggaccggacggcgagcttggtgcttctatgcgttacatctcgcaaagatattctatgccatacagggaagttgccgggctgcttacagatatcggtacagaagcccctg

SEQ ID NO: 32562 - DNA, 109 bp, Unknown
  Description of Unknown: RightRegion for integrase B6563 sequence
gtaaatgttatggtatatgataaggcggaggatacgctgagcgtggaattttacatataattttttactatatcaaaatgaagtacagtcctccgtattgactgataat

SEQ ID NO: 32563 - DNA, 260 bp, Unknown
  Description of Unknown: RightRegion for integrase B6564 sequence
cattgcgtttacgacaaagaaaatgataaattagaagtttatttctttttacaaaaatagagggggtagaagcctcctctatttttaatctgtataactaatatccgattcttcttgcactgttggtatttccgtattatcaatattatcattcttatcataaaagcaaaatgctattccagctataattatcaaaaccgatgataaagctattataacaccatattttctctttgcttgaccatgaatactcctaacaa

SEQ ID NO: 32564 - DNA, 109 bp, Unknown
  Description of Unknown: RightRegion for integrase B6565 sequence
gtaaatgttatggtgtatgataaggcggaggatttgttgagcgtggaattttacatatgattttttactatatcaaaatgaagtacagtcctccatattgactgataat

SEQ ID NO: 32565 - DNA, 199 bp, Unknown
  Description of Unknown: RightRegion for integrase B6566 sequence
attaacgaactatataaaagttcgcaccttaactcatgcggttcaccatatgatttataaaattaaagcaactatcaatgatgtgcacccaaaatattggacatattaattaggctactaattgaaacttaattctgtattctacaggactaagtccttttagttttatctttatccgttttgtattataatattttat

SEQ ID NO: 32566 - DNA, 260 bp, Unknown
  Description of Unknown: RightRegion for integrase B6567 sequence
gaaagcgtgatatgcgaaaaaaacagagataacctggcaatttatttctatgaattttgattatatcaaaaagccgctcggaggtcctgacggtgagcttggtgcatccatgcgatatctgcaccaacgctacacctgtccgtatgataaagtaaccggtattctcacagacgtcggaacagaagaatctgcacacctgtgatggaattaatcaaaccaaagatcaactcctctttactgccaatctgatacaaagctca

SEQ ID NO: 32567 - DNA, 260 bp, Unknown
  Description of Unknown: RightRegion for integrase B6568 sequence
catatggtatatgataaagaaaatgataaattggaagtgtacttcttcctgcaaaaataaatagcaaacattttacttactatatttttaccaagttgtcaaacccgcatatatgctggcttttcagcagtataccttattgaagtatggtggaccggacggcgagcttggtgcttctatgcgttacatctcgcaaagatattctatgccatacagggaagttgccgggctgcttacagatatcggcactgaggagctgg

SEQ ID NO: 32568 - DNA, 260 bp, Unknown
  Description of Unknown: RightRegion for integrase B6569 sequence
attaacgaactatataaaagttcgcaccttaactcatgcggttcaccatatgatttataaaattaaagcaactatcaatgatagttgctttttgttttttgcttaataaaattttatttaccataaaattaccagctaaaaataaacaaaactcctctaaagcttgaaaattaaacctttttataaaatctcccaaaatcctattatcgctggtaaaaaacaactaaaatccttgtgtatcaatacttttaatagtataa

SEQ ID NO: 32569 - DNA, 109 bp, Unknown
  Description of Unknown: RightRegion for integrase B6570 sequence
atagttgataaaatcattattgatgaagataaaattgaaataaaattaaatatatggtaatttataattaataaaaaaatagtgggtatataacacctcagctaaagtt

SEQ ID NO: 32570 - DNA, 109 bp, Unknown; identical to SEQ ID NO: 32549
  Description of Unknown: RightRegion for integrase B6571 sequence

SEQ ID NO: 32571 - DNA, 109 bp, Unknown
  Description of Unknown: RightRegion for integrase B6572 sequence
attaacgaactatataaaagttcgcaccttaactcatgcggttcaccatatgatttataaaattaaagcaactatcattgatagttgctttttgttttttacttaataa

SEQ ID NO: 32572 - DNA, 260 bp, Unknown
  Description of Unknown: RightRegion for integrase B6573 sequence
attaacgaactatataaaagttcgcaccttaactcatgcggttcaccatatgtaaattagcgtcgtaattaaggttacgacgttttttatttattattattttttaatcagacgatttatgacatcatattttgacatctttataataaaaaaaataaaagtcattgccttagataaatagcaacgactttttaataattataaaccattaaaaattattattcattattagtagtaaaatttttataaaaattataggc

SEQ ID NO: 32573 - DNA, 109 bp, Unknown
  Description of Unknown: RightRegion for integrase B6574 sequence
gtaaatgttatggtgtatgataaggcggaggattcgttgagcgtggaattttacatatgattttttactatatcaaaatgaagtacagtcctccgtattgactgataat

SEQ ID NO: 32574 - DNA, 260 bp, Unknown
  Description of Unknown: RightRegion for integrase B6575 sequence
cattgtgtgtatgataaggaaaatgataagctggagatatacttctttttacaaaaatagaaggggaccccccttctatttctaatcggtatatactgtatcactattttcttctattgtttcaacctgatttgtatcaattctactgtctttattataaaaataaaatgcaactaatgtaatcaatattaaagtaacagaaaaagcaataataacccaatattttctatctgattgtccgtgaatacttcttatgaaat

SEQ ID NO: 32575 - DNA, 109 bp, Unknown
  Description of Unknown: RightRegion for integrase B6576 sequence
caaagaatgtgctaccgaaaacaggactctgatttgtcattgcacattgattttttatgatttgttatgtacaagtgagatatgatatcaaattgcaataccccgttcg

SEQ ID NO: 32576 - DNA, 260 bp, Unknown
  Description of Unknown: RightRegion for integrase B6577 sequence
atcgacaatttatataaaagttcgcaagctgacgcatgtggttcaccatatgatttataaaattaaagcaactatcaatgatagttgctttttgttttttgcttaataaaattttatttaccataaaattaccagctaaaaataaacaaaactcctctaaagcttgaaaattaaacctttttataaaatctccaaaaatcctattatcgctggtaaaaaacaactaaaatccttgtatatcaatacttttaatagtataa

SEQ ID NO: 32577 - DNA, 260 bp, Unknown
  Description of Unknown: RightRegion for integrase B6578 sequence
caaagaatgtgctaccgaaaacaggactctgatttgtcattgcacattgattttttatgatttgttatgtacaagtgagatatgatatcaaattgcaataccccgttcgtatcaaaaccccaaacgccaaaacggcgaagtatatcatttcgcagcttggcggaccagacggcgagcttgccgcctccctccgctatatgaaccagcgctattccatgaagctggataaggtcaagggagtattgactgatatttccacg

SEQ ID NO: 32578 - DNA, 260 bp, Unknown
  Description of Unknown: RightRegion for integrase B6579 sequence
gtaaatgttatggtgtatgataaggcggaggatacgttaagcgtggagttttacatataattttttactatatcaaaatgaagtacagtcctccgtattgactgataatcattgccgcaagtgccggattgggattcttaatatgaatcggaaactgtaatcttttttcataattccacatcgtttaaccctccatttcccacggcattggtgttgcaacccagttccagtagttttcatttgttacatgataaaaactt

SEQ ID NO: 32579 - DNA, 260 bp, Unknown
  Description of Unknown: RightRegion for integrase B6580 sequence
cattgtgtctacgataaggaaaatgataggctggaagtatatttctttttacaaaaatagaaaggaataatcccttctatttttaattaatattatatattttccacaatgtatctattaaaaagcaaaaattcttattcacattttttgcttgttctaatgctgttaattacaggtattgctatttcctgcattacctgttttagctcatcctgtgtagcttttctctcctgtgcttcaacaagatttactaccccgtt

SEQ ID NO: 32580 - DNA, 260 bp, Unknown
  Description of Unknown: RightRegion for integrase B6581 sequence
attaacgaactatataaaagttcgcaccttaactcatgcggttcaccatatgatttataaaattaaagcaactatcaatgatagttgctttttgttttttgcttaataaaattttatttatcataaaattaccagctaaaattaagaaaaacttctctaaagcttgaaaaaaattaaacctttttataaaatctccaaaaatcctattatcgctgctaaaaaacaactaaaatccttgtatatcaatacttttaatagta

SEQ ID NO: 32581 - DNA, 109 bp, Unknown
  Description of Unknown: RightRegion for integrase B6582 sequence
gagcggatgtgctgcaataagcgccattctgatatgcagctgcatgttgtttttttataacttgttatgtacaagaagaatataagaacaaactccaattccccgttaa

SEQ ID NO: 32582 - DNA, 260 bp, Unknown
  Description of Unknown: RightRegion for integrase B6583 sequence
attaacgaactatataaaagttcgcaccttaactcatgcggttcaccatatgtaaattagcgtcgtaatcaaagttacggcgttttttgtttattattattttttaaatcagacgatttatgacatcatattttgacatctttataattaaaaaaataaaagtcattgctttagacaaatgttttatagcaatgactttttaacaattataaatcattaaaaattattatttattattagcagtaaaatctttataaaaa

SEQ ID NO: 32583 - DNA, 260 bp, Unknown
  Description of Unknown: RightRegion for integrase B6584 sequence
attaacgaattatataaaagttcgcaccttaactcatgcggttcaccatatgtaaattagcgtcgtaattaaggttacgacgttttttatttattattattttttaatcagacgatttatgacatcatattttgacatctttataataaaaaaaataaaagtcattgccttagataaatagcaacgactttttaataattataaaccattaaaaattattattcattattagtagtaaaatttttataaaaattataggc

SEQ ID NO: 32584 - DNA, 260 bp, Unknown; identical to SEQ ID NO: 32572
  Description of Unknown: RightRegion for integrase B6585 sequence

SEQ ID NO: 32585 - DNA, 183 bp, Unknown
  Description of Unknown: RightRegion for integrase B6586 sequence
gacaatattatatacaacaaaaaagaaaacacattatatgtcacatttaaagaagtatagagtccactcaatagtggacttttttattgaaaacatggactttttaacacttacaccaaattgtctttatatcgataatatcagggtgcatattttcatagataaatttagctgcactaacaa

SEQ ID NO: 32586 - DNA, 109 bp, Unknown
  Description of Unknown: RightRegion for integrase B6587 sequence
gtaaatgttatggtgtatgataaggcggaggatacgctgagcgtggaattttacatataattttttactatatcaaaatgaagtacagtcctccgtattgactgataat

SEQ ID NO: 32587 - DNA, 260 bp, Unknown
  Description of Unknown: RightRegion for integrase B6588 sequence
atcgacaatctatacaaaagttcgcaagccgacgcatgtggttcaccatataatttataaaattaaagcaactatcattgatagttgctttttatttttcctaaataactaataaccttttatttattctcaaattttaccaactaaaatcaaacaaaactacgctaaagcttgaaaattaaacctttttataaaatctccaaaaatcctattatcgctggtaaaaaacaactaaaatccttgtgtatcaatacttttaa

SEQ ID NO: 32588 - DNA, 260 bp, Unknown
  Description of Unknown: RightRegion for integrase B6589 sequence
cattgtgtctacgataaggaaaatgataggctggaagtatatttctttttacaaaaatagaagggaataatcccttctatttttaattaatattatatattttccacaatgtatctattaaaaagcaaaaattcttattcacattttttgcttgttctaatgctgttaattacaggtattgctatttcctgcattacctgttttagctcatcctgtgtagcttttctctcctgtgcttcaacaagatttactaccccgtt

SEQ ID NO: 32589 - DNA, 109 bp, Unknown
  Description of Unknown: RightRegion for integrase B6590 sequence
gagcggatgtgctgcaataagcgccattctgatatgcagttgcatgttgtttttttataatttattatgtacaagaagaatataagaacaaactccaattccccgttaa

SEQ ID NO: 32590 - DNA, 109 bp, Unknown
  Description of Unknown: RightRegion for integrase B6591 sequence
aggataattttcagcaaggaaacttttgaattaaagttctatctgttcttaaaattgtaaaagcctttattttaggggagttttttaatcacaaggtatcgaatacgga

SEQ ID NO: 32591 - DNA, 260 bp, Unknown
  Description of Unknown: RightRegion for integrase B6592 sequence
cacgcagacggaacagtgaccgtaaacttgggcgtacatattaatggttgcggggactagacttgaaccagcgaccttcgggttatgagtagtatattatattttactcacactttcactttataccgcaaaaccgcataataaagccatttttataactattgcttttcgcattttaccgtactttgtccgctgtttttatatatgtagcggacaaatagcggacaggattttatattgctatctaatatacattatca

SEQ ID NO: 32592 - DNA, 260 bp, Unknown
  Description of Unknown: RightRegion for integrase B6593 sequence
attaacgaactatataaaagttcgcaccttaactcatgcggttcaccatatgtaaattagcgtcgtaatcaaagttacggtgttttttgtttattattattttttaaatcagacgatttatgacatcatattttgacatctttataattaaaaaaataaaagtcattgctttagacaaatgttttatagcaatgactttttaacaattataaatcattaaaaattattatttattattagcagtaaaatctttataaaaa

SEQ ID NO: 32593 - DNA, 109 bp, Unknown; identical to SEQ ID NO: 32573
  Description of Unknown: RightRegion for integrase B6594 sequence

SEQ ID NO: 32594 - DNA, 260 bp, Unknown
  Description of Unknown: RightRegion for integrase B6595 sequence
caaagaatgtgctgtaataaccggaattccgatctgacactcgatgcggtgtttttataaccttatatgtgcaagtaatatattggaataaactgcaatatctttcatgtacatataaccataggggaaacaaaagctcagtcgcttgttttttatagaacagaatgtacaaaacgaactacaatatcttgtgcattcctacaaagtcacgcattgcgtgaactttttgtattatttctattgacttatcacccgttggg

SEQ ID NO: 32595 - DNA, 109 bp, Unknown; identical to SEQ ID NO: 32549
  Description of Unknown: RightRegion for integrase B6596 sequence

SEQ ID NO: 32596 - DNA, 260 bp, Unknown
  Description of Unknown: RightRegion for integrase B6597 sequence
caaagaatgtgctaccgaaaacaggactctgatttgtcattgcacattgattttttatgatttgttatgtacaagtgagatatgatatcaaattgcaataccccgttcgtatcaaaaccccaaacgccaaaacggcgaagtatatcatttcgcagcttggaggaccagacggcgagcttgccgcctctctccgctatatgaaccagcgctattccatgaagctggataaggtcaagggagtattgactgacatttccacg

SEQ ID NO: 32597 - DNA, 260 bp, Unknown
  Description of Unknown: RightRegion for integrase B6598 sequence
attaacgaactatataaaagttcgcaccttaactcatgcggttcaccatatgatttataaaattaaagcaactatcattgatagttgctttttgttttttacttaataaaattttatttaccataaaattaccagctaaaattaagaaaaacttctctaaagcttgaaaattaaatctttttataaaatctctaaaaatcctattatcgctggtaaaaaacaactaaaatccttgtatatcaatacttttaatagtataa

SEQ ID NO: 32598 - DNA, 109 bp, Unknown
  Description of Unknown: RightRegion for integrase B6599 sequence
gtaaatgttatggtatatgataaggcggaggatacgctgagcgtggaattttacatataaaaacgactatccactgttaaaattcccctatataatacagataagggca

SEQ ID NO: 32599 - DNA, 109 bp, Unknown; identical to SEQ ID NO: 32573
  Description of Unknown: RightRegion for integrase B6600 sequence

SEQ ID NO: 32600 - DNA, 260 bp, Unknown
  Description of Unknown: RightRegion for integrase B6601 sequence
cgcttgtgtataggttgggggatgcctgatggcgtcccctttccgttcccattgccgtgaaacgccgtattttgcgttttaaggcgttttaagcccgttggggtactcgtgtacccctcgggcttttttcgtgccttaaaacgcctctgaagcggtctgagggatattcgagcgcccatgtgcatctcgcatccgctcgatgcaagggtggccgccctgcgggcggcagttggatgcgggtggacgtacagaaggggtgc

SEQ ID NO: 32601 - DNA, 260 bp, Unknown
  Description of Unknown: RightRegion for integrase B6602 sequence
cattgtgtgtatgataaggaaaatgataagctggagatatacttctttttacaaaaataaatagcaaacattttacttgctatattttttcaaagttatcaaacccgcatatatactggtttttcaacagtataccttattgaagtatggtggaccggacggcgagcttggtgcttctatgcgttacatctcgcaaagatattctatgccatacagggaagttgccgggctgcttacagatatcggcactgaggagctag

SEQ ID NO: 32602 - DNA, 260 bp, Unknown
  Description of Unknown: RightRegion for integrase B6603 sequence
cattgtgtgtatgacaaagagaatgataagctggaagtatatttctttttgcaaaaatagaagggattattcccttctattttttaatcaatattatatattttccacaatgtatctattaaaaagcaaaattcttattcacattttttgcttgttctaatcctgttaattacaggtattgctatttcctgcattacctgtttcagctcatcctgtgtagcttttctttcctgtgcttcaacaagatttactaccccgtt

SEQ ID NO: 32603 - DNA, 260 bp, Unknown
  Description of Unknown: RightRegion for integrase B6604 sequence
catatggtatatgataaagaaaatgataaattggaagtgtacttcttcctgcaaaaataaatagcaaacattttacttactatatttttaccaagttgtcaaacccgcatatatgctggcttttcagcagtataccttattgaagtatggtggaccggacggcgagcttggtgcttctatgcgttacatctcgcaaagatattctatgccatacagggaagttgccgggctgcttacagatatcggcactgaggaattag

SEQ ID NO: 32604 - DNA, 260 bp, Unknown
  Description of Unknown: RightRegion for integrase B6605 sequence
cattgtgtttacgataaggaaaatgacaagttggaagtgtatttctttttacaaaaatagaagggaataatcccttctatttttaattaatattatatatttcccacaatgtatctattaaaaagcaaaaattcttattcacattttttgcttgttctaatgctgttaattaaaggtattgctatttcctgcattacctgttttagctcatcttgtgtagcttttctctcctgtgcttcaacaagatttactaccccgtt

SEQ ID NO: 32605 - DNA, 260 bp, Unknown
  Description of Unknown: RightRegion for integrase B6606 sequence
cattgtgtatatgataaagagaatgacaagttggaagtgtatttcttcttgcaaaaatagaagggagctttcccttctatttttaatcagtatatattgtatcattattttcttctattgtttgaacttgatctacatctattctatcgtctttgttataacaataaaatgccgccaatgcaattattattaaagtgatagaaaaagcaataataacccaatatttcctatctaattgtccatgaatacttcttataaaa

SEQ ID NO: 32606 - DNA, 260 bp, Unknown
  Description of Unknown: RightRegion for integrase B6607 sequence
cattgtgtatatgataaagagaatgacaagttggaagtgtatttcttcttgcaaaaataagaaaaggtgagcttttactcaccttttctttattatttctttattacattccatgtttcaattgcatctttaataaattgatataaatacattaacacaatgattactattaatacaacacttactattaaagtaacaatatttacattaataggaactaaatcctttaacgatgttattatttctgttatttgattaat

SEQ ID NO: 32607 - DNA, 109 bp, Unknown; identical to SEQ ID NO: 32549
  Description of Unknown: RightRegion for integrase B6608 sequence

SEQ ID NO: 32608 - DNA, 260 bp, Unknown; identical to SEQ ID NO: 32567
  Description of Unknown: RightRegion for integrase B6609 sequence

SEQ ID NO: 32609 - DNA, 260 bp, Unknown
  Description of Unknown: RightRegion for integrase B6610 sequence
cattgtgtgtatgataaagagaatgataagttggaagtgtatttcttcttacaaaaatagaagggaactttcccttctatttttaatcagtatatattgtatcattattttcttctattgtttgaacttgatctacatctattctatcgtctttgttataacaataaaatgctgccaatgcgattattattaaagtgatagaaaaagcaataataacccaatatttcctatctaattgtccatgaatacttcttataaaa

SEQ ID NO: 32610 - DNA, 260 bp, Unknown
  Description of Unknown: RightRegion for integrase B6611 sequence
cattgtgtgtatgacaaagagtatgataagctggaagtatatttctttttgcaaaaatagaagggattattcccttctattttttaatcaatattatatattttccacaatgtatctattaaaaagcaaaattcttattcacattttttgcttgttctaatcctgttaattacaggtattgctatttcctgcattacctgtttcagctcatcctgtgtagcttttctttcctgtgcttcaacaagatttactaccccgtt

SEQ ID NO: 32611 - DNA, 260 bp, Unknown
  Description of Unknown: RightRegion for integrase B6612 sequence
cattgtgtttacgataaggaaaatgacaagttagaagtgtatttctttttacaaaaatagaagggaataatcccttctatttttaattaatattatatatttcccacaatgtatctattaaaaagcaaaaattcttattcacattttttgcttgttctaatgctgttaattacaggtattgctatttcctgcattacctgttttagctcatcttgtgtagcttttctctcctgtgcttcaacaagatttactaccccgtt

SEQ ID NO: 32612 - DNA, 260 bp, Unknown
  Description of Unknown: RightRegion for integrase B6613 sequence
attgtatttgacaaagagaataaaacattagattttcactattacataaaagaagattagatcattgagatattttttagaaatcatgtatattgtttttccgagatacatatgctataatgccagtaggcaaaatgatagcaatgtttcaagttgaaacaaaaaagaaaaaacctcagtacggcaatactggggttttttcttgtctataatgggacaagatccacggttaggttgtacgctatttatgcctgtctaac

SEQ ID NO: 32613 - DNA, 260 bp, Unknown; identical to SEQ ID NO: 32611
  Description of Unknown: RightRegion for integrase B6614 sequence

SEQ ID NO: 32614 - DNA, 260 bp, Unknown; identical to SEQ ID NO: 32605
  Description of Unknown: RightRegion for integrase B6615 sequence

SEQ ID NO: 32615 - DNA, 260 bp, Unknown
  Description of Unknown: RightRegion for integrase B6616 sequence
catatggtatatgataaagaaaatgataaattggaagtgtatttctttctgcaaaaataaatagcaaacattttacttgctatatttttacaaagttgtcaaacctgcatatatgctggtttttcagcagtataccttattgaagtatggtggaccggacggcgagcttggtgcttctatgcgttacatctcgcaaagatattctatgccatacagggaagttgccgggctgcttacagatatcggcactgaggagctgg

SEQ ID NO: 32616 - DNA, 260 bp, Unknown
  Description of Unknown: RightRegion for integrase B6617 sequence
cattgtgtgtatgataaagagaatgataagttagaagtgtatttcttcttgcaaaaatagaagggaactttcccttctatttttaatcagtatatattgtatcattattttcttctattgtttgaacttgatctacatctattctatcgtctttgttataacaataaaatgctgccaatgcaattattattaaagtgatagaaaaagcaataataacccaatatttcctatctaattgtccatgaatacttcttataaaa

SEQ ID NO: 32617 - DNA, 260 bp, Unknown
  Description of Unknown: RightRegion for integrase B6618 sequence
aatggtgcaggaaaaacaccacaaaatttatacccacgtgaaatagaactaatttcttaaatttagatgttagaagggccattcaggccctttttaatttatcgtatttttcttaattatttttctttataatagttcattgaactaattcctaatagcgctccaatgaatagatccaccgcggatattgttcccgctacttcctttgcatatggaaatccccatatacccgccaccgctacatataaagttgcagcagc

SEQ ID NO: 32618 - DNA, 260 bp, Unknown; identical to SEQ ID NO: 32611
  Description of Unknown: RightRegion for integrase B6619 sequence

SEQ ID NO: 32619 - DNA, 260 bp, Unknown
  Description of Unknown: RightRegion for integrase B6620 sequence
catatggtatatgataaagaaaatgataaattggaagtgtacttcttcctgcaaaaataaatagcaaacattttacttactatatttttaccaagttgtcaaacccgcatatatgctggcttttcagcagtataccttattgaagtatggtggcccggacggcgagcttggtgcttctatgcgttacatctcgcaaagatattctatgccatacagggaagttgccgggctgcttacagatatcggcactgaggagctgg

SEQ ID NO: 32620 - DNA, 109 bp, Unknown; identical to SEQ ID NO: 32549
  Description of Unknown: RightRegion for integrase B6621 sequence

SEQ ID NO: 32621 - DNA, 260 bp, Unknown
  Description of Unknown: RightRegion for integrase B6622 sequence
cattgtgtatatgataaagagaatgacaagttggaagtgtatttcttcttgcaaaaataaaagagagactgataagcaatcagtctctctaagtcatttatgaatcacttttatcgttgttatccttctgatcttcatgttcgtcttccgcaggatagtcaaaaatgctctttaaatcaaatcccatattgtacctcctttgaagccttaatatttaatgcttatttagtataacttattaattttttgttgtcaatatt

SEQ ID NO: 32622 - DNA, 260 bp, Unknown
  Description of Unknown: RightRegion for integrase B6623 sequence
attgtatttgacaaagagaataaaacattagattttcactattacataaaagaagattagatcattcagatgtttttagaaatcatgtatattgtttttccgagatacatatgctataatgccagtaggcaaaatgatagcatatgtttcaagttgaaacaaaaaagaaaaaacctcagtactgcaatactggggttttttcttgtctataatgggacaagatccacggttaggttgtacgctatttatgcctgtctaac

SEQ ID NO: 32623 - DNA, 260 bp, Unknown; identical to SEQ ID NO: 32611
  Description of Unknown: RightRegion for integrase B6624 sequence

SEQ ID NO: 32624 - DNA, 260 bp, Unknown
  Description of Unknown: RightRegion for integrase B6625 sequence
cattgtgtatatgataaagagaatgacaagttggaagtgtatttcttcttgcaaaaataaaagagagactgataagcaatcagtctctctaagtcatctatgaatcacttttatcgttgttatccttctgatcttcatgttcgtcttccgcaggatagtcaaaaatgctctttaaatcaaatcccatattgtacctcctttgaagccttaatatttaatgcttatttagtataacttattaattttttgttgtcaatatt

SEQ ID NO: 32625 - DNA, 260 bp, Unknown
  Description of Unknown: RightRegion for integrase B6626 sequence
agcggcgaaaacaataccgctactatttcggatttggacttatcaagtccaccattttaatcgctggtcgaacacctgaatgcgagatcattgtcttgcgttatggtttctggctggcactcgatttgaccgttcaggtttgacctgggcggtcttttcgtttagggcggccgagactcctcagcaatgctcttccagtcgattctctttccgcaatcagggcagaatgagaaacgggtcaaatccgtgctgcgccgtcg

SEQ ID NO: 32626 - DNA, 109 bp, Unknown
  Description of Unknown: RightRegion for integrase B6627 sequence
catatggtatatgataaagaaaatgataaattggaagtgtacttcttcctgcaaaaataaatagcaaacattttacttactatatttttaccaaattgtcaaacccgca

SEQ ID NO: 32627 - DNA, 109 bp, Unknown
  Description of Unknown: RightRegion for integrase B6628 sequence
gagaaaatagtttacaataaaagagaaggaattattgacttttattattactacagttaaaccactatatttttttcctctacatacataccctgttgcaatatggtca

SEQ ID NO: 32628 - DNA, 260 bp, Unknown; identical to SEQ ID NO: 32602
  Description of Unknown: RightRegion for integrase B6629 sequence

SEQ ID NO: 32629 - DNA, 260 bp, Unknown; identical to SEQ ID NO: 32611
  Description of Unknown: RightRegion for integrase B6630 sequence

SEQ ID NO: 32630 - DNA, 260 bp, Unknown; identical to SEQ ID NO: 32611
  Description of Unknown: RightRegion for integrase B6631 sequence

SEQ ID NO: 32631 - DNA, 260 bp, Unknown
  Description of Unknown: RightRegion for integrase B6632 sequence
attgtatttgacaaagagaataaaacattagattttcactattacataaaagaagattagatcattcagatgtttttagaaatcatgtatattgtttttccgagatacatatgctataatgccagtaggcaaaatgatagcaatgtttcaagttgaaacaaaaaaagaaaaaacctcagtactgcaatactggggttttttcttgtctataatgggacaagatccacggttaggttgtacgctatttatgcctgtctaac

SEQ ID NO: 32632 - DNA, 260 bp, Unknown; identical to SEQ ID NO: 32621
  Description of Unknown: RightRegion for integrase B6633 sequence

SEQ ID NO: 32633 - DNA, 260 bp, Unknown; identical to SEQ ID NO: 32611
  Description of Unknown: RightRegion for integrase B6634 sequence

SEQ ID NO: 32634 - DNA, 109 bp, Unknown
  Description of Unknown: RightRegion for integrase B6635 sequence
cattgtgtgtatgataaggaaaatgataagctggagatatacttctttttacaaaaataaatagcaaacattttacttgctatattttttcaaagttatcaaacccgca

SEQ ID NO: 32635 - DNA, 109 bp, Unknown; identical to SEQ ID NO: 32549
  Description of Unknown: RightRegion for integrase B6636 sequence

SEQ ID NO: 32636 - DNA, 109 bp, Unknown
  Description of Unknown: RightRegion for integrase B6637 sequence
ggcgctataggtccaggtggcgaggtgttcgaccgaatgaacgccagctccaccatgtgaatcccagcctcgcatatgcgaggctttttctttttcgcacattgtgctt

SEQ ID NO: 32637 - DNA, 260 bp, Unknown
  Description of Unknown: RightRegion for integrase B6638 sequence
catatggtatatgataaagaaaatgataaattggaagtgtatttctttctgcaaaaataaatagcaaacattttacttgctatatttttacaaagttgtcaaacctgcatatatgctggtttttcagcagtataccttattgaagtatggtggaccggacggcgagcttggtgcttctatgcgttacatctcgcaaagatattctatgccatacagggaagttgccgggctgcttacagatatcggcactgaggaattag

SEQ ID NO: 32638 - DNA, 260 bp, Unknown; identical to SEQ ID NO: 32611
  Description of Unknown: RightRegion for integrase B6639 sequence

SEQ ID NO: 32639 - DNA, 260 bp, Unknown
  Description of Unknown: RightRegion for integrase B6640 sequence
cattgtgtctacgataaggaaaatgataggctggaagtatatttctttttacaaaaatagaagggaataatcccttctatttttaattaatattatatattttccacaatgtatctattaaaaagcaaaaattcttattcacattttttgcttgttctaatgctgttaattacaggtattgctatttcctgcattacctgttttagctcatcttgtgtagcttttctctcctgtgcttcaacaagatttactaccccgtt

SEQ ID NO: 32640 - DNA, 260 bp, Unknown
  Description of Unknown: RightRegion for integrase B6641 sequence
cattgtgtatatgataaagagaatgacaagttggaagtgtatttcttcttgcaaaaatagaagggaactttcccttctatttttaatcagtatatattgtatcattattttcttctattgtttgaacttgatctacatctattctatcgtctttgttataacaatgaaatgctgccaatgcaattattattaaagtgatagaaaaagcaataataacccaatatttcctatctaattgtccatgaatacttcttataaaa

SEQ ID NO: 32641 - DNA, 109 bp, Unknown
  Description of Unknown: RightRegion for integrase B6642 sequence
attgtatttgacaaagagaataaaacattagattttcactattacataaaagaagattagatcattcagatgtttttagaaatcatgtatattgtttttccgagataca

SEQ ID NO: 32642 - DNA, 260 bp, Unknown
  Description of Unknown: RightRegion for integrase B6643 sequence
cattgtgtttacgataaggaaaatgacaagttggaagtgtatttctttttacaaaaatagaagggaataatcccttctatttttaattaatattatatatttcccacaatgtatctattaaaaagcaaaaattcttattcacattttttgcttgttctaatgctgttaattacaggtattgctatttcctgcattacctgttttagctcatcttgtgtagcttttctctcctgtgcttcaacaagatttactaccccgtt

SEQ ID NO: 32643 - DNA, 101 bp, Unknown
  Description of Unknown: RightRegion for integrase B6644 sequence
agcggcgaaaacaataccgctactatttcggatttggacttatcaagtccaccaacataaaagccacctgaaaacttacgtttcaggtggcttttgctata

SEQ ID NO: 32644 - DNA, 260 bp, Unknown; identical to SEQ ID NO: 32616
  Description of Unknown: RightRegion for integrase B6645 sequence

SEQ ID NO: 32645 - DNA, 260 bp, Unknown
  Description of Unknown: RightRegion for integrase B6646 sequence
agcggcgaaaacaataccgctactatttcggatttggacttatcaagtccaccaatttaatcgcaggtcgaacccctgaggtgacgatagtcgttctgccttacggtttcgtacttgcgacccagattaaggataggctttaagcctgtcctttttctttaggtagtcgagtagcgcgtgtaacaaagattccctatatatacatgtaatgcgagggggcgacgagattgcgccttgagtccctttactttttcaaaaaa

SEQ ID NO: 32646 - DNA, 260 bp, Unknown
  Description of Unknown: RightRegion for integrase B6647 sequence
attgtatttgacaaagagaataaaacattagattttcactattacataaaagaagattagatcatttcagattttttagaaatcatgtatattgtttttccgagatacatatgctataatgccagtaggcaaaatgatagcaatgtttcaagttgaaacaaaaaagaaaaaaacctcagtacggcaatactggggttttttcttgtctataatgggacaagatccacggttaggttgtacgctatttatgcctgtctaac

SEQ ID NO: 32647 - DNA, 260 bp, Unknown
  Description of Unknown: RightRegion for integrase B6648 sequence
ccccgggcggattcgaaccgtcgacacgcggattatgattccgctgctctaaccaactgagctaccccgccatcgggttcgagctatttaataataaattcttcccgccttgtcaatagctatttttaaaattaatgtttattgcacaatctttttgccccgccttgcattctccttttccgtgattatctagcttagataattaagttatagacttaaggagagattgaaacatgcggcacaaaacattattggtctgg

SEQ ID NO: 32648 - DNA, 260 bp, Unknown
  Description of Unknown: RightRegion for integrase B6649 sequence
attgtatttgacaaagagaataaaacattagattttcactattacataaaagaagattagatcatttcagattttttagaaatcatgtatattgtttttccgagatacatatgctataatgccagtaggcaaaatgatagcaatgtttcaagttgaaacaaaaaagaaaaaaacctcagtactgcaatactggggttttttcttgtctataatgggacaagatccacggttaggttgtacgctatttatgcctgtctaac

SEQ ID NO: 32649 - DNA, 260 bp, Unknown
  Description of Unknown: RightRegion for integrase B6650 sequence
ttatttgatcatatcacttataataaaaaagaaaatacccttgaaatcgtttataaataaagcgattattatttgtactttatcagtataccttttggacttattccctacaaggtctccacgtttacaatattcactagtactttgtgcaactccttgccataatttgcaaccaataaaatccgtatcatattccccatttacatttttataagttcgaggtaccgctaaagtaatacgtgtaagtttctttccagatt

SEQ ID NO: 32650 - DNA, 260 bp, Unknown
  Description of Unknown: RightRegion for integrase B6651 sequence
tatgacaatgaaaaagatactcttgatatatactttagattaatagaaaaaagcctgtaaatacaggctttttaatgattataccttacggaagtacggtggtccatacttctgtaaggtatagtgttcaaaaaatcaggttttatcaggctttatagatagtctggttggtttttctatctacaatttcaccttttatttggttggcatttctaacagcatatttatatgttgtatatgcgccatactgtttacctttt

SEQ ID NO: 32651 - DNA, 260 bp, Unknown; identical to SEQ ID NO: 32646
  Description of Unknown: RightRegion for integrase B6652 sequence

SEQ ID NO: 32652 - DNA, 260 bp, Unknown
  Description of Unknown: RightRegion for integrase B6653 sequence
cgcattgtatgggacaaggcgaagaatcttttgcagatttattatcgcctgatcctctaaatttttctccaaatcatagcacgttacagtatggaggcccttatatcaacacactatagaaattgctacatatcatgcctttttataaagtatctgtactctgttttagatcacatcatacgtttccataaagatgtccggtttacaaggataaaactcgccgtgtacacccttaatgatgtagtcacccacacgggcct

SEQ ID NO: 32653 - DNA, 260 bp, Unknown; identical to SEQ ID NO: 32646
  Description of Unknown: RightRegion for integrase B6654 sequence

SEQ ID NO: 32654 - DNA, 260 bp, Unknown
  Description of Unknown: RightRegion for integrase B6655 sequence
attgtatttgacaaagagaataaaacattagattttcactattacataaaagaagattagatcatttcagattttttagaaatcatgtatattgtttttccgagatacatatgctataatgccagtaggcaaaatgatagcaatgtttcaagttgaaacaaaaaaagaaaaaacctcagtacggcaatactggggttttttcttgtctataatgggacaagatccacggttaggttgtacgctatttatgcctgtctaac

SEQ ID NO: 32655 - DNA, 109 bp, Unknown
  Description of Unknown: RightRegion for integrase B6656 sequence
attgtatttgacaaagagaataaaacattagattttcactattacataaaagaagattagatcatttcagattttttagaaatcatgtatattgtttttccgagataca

SEQ ID NO: 32656 - DNA, 109 bp, Unknown; identical to SEQ ID NO: 32655
  Description of Unknown: RightRegion for integrase B6657 sequence

SEQ ID NO: 32657 - DNA, 260 bp, Unknown; identical to SEQ ID NO: 32646
  Description of Unknown: RightRegion for integrase B6658 sequence

SEQ ID NO: 32658 - DNA, 260 bp, Unknown
  Description of Unknown: RightRegion for integrase B6659 sequence
tatttttcgtccagtgttgcaaatggcagtgcattattatgctggtcaaataatgcctgaaccatgggcatcatggtataaaggatattaaagcggtgtttatggaggaagctgtatgattatatcatgtaataatattcgtgaaattgaaaatatcaatttgcatgatgcgtatattgaaaatgtaatctataatcattccaataaggtaattaatgttgagttagaaagtgaatgggaaaaaactgattatgatttga

SEQ ID NO: 32659 - DNA, 260 bp, Unknown
  Description of Unknown: RightRegion for integrase B6660 sequence
tatgacaacgaaaaagatactcttgatatatactttagattaatagaaaaaagcccgtaaatacaggctttttaatgattataccttacggaagtacggtggtccggatggtgaggcaagtgcaagtatgcgatatatgtcacagcgttattcaataggtgacaggcaggttgcaggagtccttaccgatatcgctacagaagaattggcacattgatgttggatattgtagcaaaatgctttcattatgttattttttt

SEQ ID NO: 32660 - DNA, 260 bp, Unknown; identical to SEQ ID NO: 32646
  Description of Unknown: RightRegion for integrase B6661 sequence

SEQ ID NO: 32661 - DNA, 109 bp, Unknown; identical to SEQ ID NO: 32655
  Description of Unknown: RightRegion for integrase B6662 sequence

SEQ ID NO: 32662 - DNA, 109 bp, Unknown
  Description of Unknown: RightRegion for integrase B6663 sequence
aaggacattgtttttgaccgcaaaaaggggcatttatatattcacttttatatatcataggttattacaatccggcccgccgtactggctcattataaactgggccatc

SEQ ID NO: 32663 - DNA, 260 bp, Unknown; identical to SEQ ID NO: 32612
  Description of Unknown: RightRegion for integrase B6664 sequence

SEQ ID NO: 32664 - DNA, 260 bp, Unknown; identical to SEQ ID NO: 32611
  Description of Unknown: RightRegion for integrase B6665 sequence

SEQ ID NO: 32665 - DNA, 260 bp, Unknown
  Description of Unknown: RightRegion for integrase B6666 sequence
attgtatttgacaaagagaataaaacattagattttcactattacataaaagaagattagatcattgagatatttttagaaatcatgtatattgtttttccgagatacatatgctataatgccagtaggcaaaatgatagcaatgtttcaagttgaaacaaaaaaagaaaaaacctcagtacggcaatactggggttttttcttgtctataatgggacaagatccacggttaggttgtacgctatttatgcctgtctaac

SEQ ID NO: 32666 - DNA, 109 bp, Unknown; identical to SEQ ID NO: 32655
  Description of Unknown: RightRegion for integrase B6667 sequence

SEQ ID NO: 32667 - DNA, 260 bp, Unknown; identical to SEQ ID NO: 32646
  Description of Unknown: RightRegion for integrase B6668 sequence

SEQ ID NO: 32668 - DNA, 109 bp, Unknown
  Description of Unknown: RightRegion for integrase B6669 sequence
aaggacattgtttttgaccgcaaaaaggggcatttatatattcacttttatgtatcataggttattacaatccggccctccgtactggctcattataaactgggccatc

SEQ ID NO: 32669 - DNA, 260 bp, Unknown
  Description of Unknown: RightRegion for integrase B6670 sequence
attgtatttgacaaagagaataaaacattagattttcactattacataaaagaagattagatcattgagatattttttagaaatcatgtatattgtttttccgagatacatatgctataatgccagtaggcaaaatgatagcaatgtttcaagttgaaacaaaaaagaaaaaaacctcagtacggcaatactggggttttttcttgtctataatgggacaagatccacggttaggttgtacgctatttatgcctgtctaa

SEQ ID NO: 32670 - DNA, 109 bp, Unknown
  Description of Unknown: RightRegion for integrase B6671 sequence
gttgaaaaaatagtgctgcatcgtccttcaaacgaaatcgaaattttttatcattattaattatctcttaaaacaatatgctccaccatattgactaatgataattttt

SEQ ID NO: 32671 - DNA, 109 bp, Unknown
  Description of Unknown: RightRegion for integrase B6672 sequence
attgtattcgataaagaaaacaaaaccttagatttttattattacataaaagaagattagatcattcagatgtttttagaaatcatgtatattgtttttccgagataca

SEQ ID NO: 32672 - DNA, 260 bp, Unknown
  Description of Unknown: RightRegion for integrase B6673 sequence
attgtatttgacaaagagaataaaacattagattttcactattacataaaagaagattagatcatttcagattttttagaaatcatgtatattgtttttccgagatacatatgctataatgccagtaggcaaaatgatagcaatgtttcaagttgaaacaaaaaagaaaaaacctcagtacggcaatactggggttttttcttgtctataatgggacaagatccacggttaggttgtacgctatttatgcctgtctaacc

SEQ ID NO: 32673 - DNA, 260 bp, Unknown
  Description of Unknown: RightRegion for integrase B6674 sequence
ataaaagagatagttgttaataaagaagctgatactattgatattcattacttcagctagttttatcccattaaacaacaaggatgaccataacgtttaatgggtaaaatataaaaaacagggttagtactattgctaaccctttatttatttcacatataaatcggcttcataagcgcaatatcctttactgcacctaataagatttagtgaatggtatctttttagatttagtaggtcttctactgcaaaaccaaatt

SEQ ID NO: 32674 - DNA, 109 bp, Unknown
  Description of Unknown: RightRegion for integrase B6675 sequence
attgtatttgacaaagagaataaaacattagattttcactattacataaaagaagattagatcattgagatattttttagaaatcatgtatattgtttttccgagatac

SEQ ID NO: 32675 - DNA, 260 bp, Unknown
  Description of Unknown: RightRegion for integrase B6676 sequence
attgtattcgataaagaaaacaaaaccttagatttttattattacataaaagaagattagatcattcagatgtttttagaaatcatgtatattgtttttccgagatacatatgctataatgccagtaggcaaaatgatagcaatgtttcaagttgaaacaaaaaagaaaaaacctcagtactgcaatactggggttttttcttgtctataatgggacaagatccacggttaggttgtacgctatttatgcctgtctaacc

SEQ ID NO: 32676 - DNA, 260 bp, Unknown
  Description of Unknown: RightRegion for integrase B6677 sequence
tatgacaacgaaaaagatactcttgatatatactttagattaatagaaaaaagcctgtaaatacaggctttttaatgattataccttacggaagtacggtggtccatacttctgtaaggtatagtgttcaaaaaatcaggttttatcaggctttatagatagtctggttggtttttctatctacaatttcaccttttattttgtcggcatttctaacagcatatttatatgttgtatatgcgccatactgtttacctttt

SEQ ID NO: 32677 - DNA, 260 bp, Unknown; identical to SEQ ID NO: 32648
  Description of Unknown: RightRegion for integrase B6678 sequence

SEQ ID NO: 32678 - DNA, 172 bp, Unknown
  Description of Unknown: RightRegion for integrase B6679 sequence
attgtattcgataaagaaaacaaaaccttagatttctattattatataaaagaagattgagtcatggccccttgattccgcagtattacttggtttgcagagtttatacgcacttgcagaatggatgacgcagtggggttctaaatacttaggcgatcagggatatgctccg

SEQ ID NO: 32679 - DNA, 260 bp, Unknown; identical to SEQ ID NO: 32648
  Description of Unknown: RightRegion for integrase B6680 sequence

SEQ ID NO: 32680 - DNA, 109 bp, Unknown; identical to SEQ ID NO: 32655
  Description of Unknown: RightRegion for integrase B6681 sequence

SEQ ID NO: 32681 - DNA, 260 bp, Unknown
  Description of Unknown: RightRegion for integrase B6682 sequence
attgtattcgacaaagaaaacaaaaccttagatttctattattacgtaaaagaagattaagccatagcccattaattccgcagtattacttggtttgcatagtttatacgcacttgcagaatggatgacgcagtggggttctaaatacttaggtgatcagggatatgctccgattgagatcttgagatattattatggagagagtatgtacatcaataccgcagaacagatttcaggaattccttcttcctggccgggat

SEQ ID NO: 32682 - DNA, 109 bp, Unknown; identical to SEQ ID NO: 32671
  Description of Unknown: RightRegion for integrase B6683 sequence

SEQ ID NO: 32683 - DNA, 109 bp, Unknown
  Description of Unknown: RightRegion for integrase B6684 sequence
attgtatttgacaaagagaataaaacattagattttcactattacataaaagaagattagatcattgagatatttttagaaatcatgtatattgtttttccgagataca

SEQ ID NO: 32684 - DNA, 260 bp, Unknown
  Description of Unknown: RightRegion for integrase B6685 sequence
tatgacaacgaaaaagatactcttgatatatactttagattaatagaaaaaagcctgtaaatacaggctttttaatgattataccttacggaagtacggtggtccggatggtgaggcaggtgcaagcatgcgatatatgtcacagcgttattcaataggtgacaggcaggttgcaggagtccttaccgatatcgctacagaagaattggcgcacctcgagatgattgccacaatgattcaccagcttacaaggaatctta

SEQ ID NO: 32685 - DNA, 260 bp, Unknown
  Description of Unknown: RightRegion for integrase B6686 sequence
attgtatttgacaaagagaataaaacattagattttcactattacataaaagaagattagatcattgagatattttttagaaatcatgtatattgtttttccgagatacatatgctataatgccagtaggcaaaatgatagcaatgtttcaagttgaaacaaaaaaagaaaaaacctcagtacggcaatactggggttttttcttgtctataatgggacaagatccacggttaggttgtacgctatttatgcctgtctaa

SEQ ID NO: 32686 - DNA, 260 bp, Unknown
  Description of Unknown: RightRegion for integrase B6687 sequence
aagatcgtgtacgataaagaacacggaaaactaaaatgctattattatatttcaatttaacccggaaaacccatgatgcgcggctttccgggtacttatctgtttccgcactatggtcctccttattgtaaaaacagataacgcattaaggcctctggctgtatactctgacagtgcgaaaatataattatgagggagagaagggggaaaaatgaaccgaacagatgaattatttttttgagataattgagacctaccag

SEQ ID NO: 32687 - DNA, 260 bp, Unknown; identical to SEQ ID NO: 32612
  Description of Unknown: RightRegion for integrase B6688 sequence

SEQ ID NO: 32688 - DNA, 109 bp, Unknown; identical to SEQ ID NO: 32671
  Description of Unknown: RightRegion for integrase B6689 sequence

SEQ ID NO: 32689 - DNA, 109 bp, Unknown
  Description of Unknown: RightRegion for integrase B6690 sequence
gttgaaaaaatagtgcttcatcgtccttcaaacgaaattgaaattttttatcattattgattatctcttaaaacaatacgcaccaccatattgactaatgataattttt

SEQ ID NO: 32690 - DNA, 260 bp, Unknown; identical to SEQ ID NO: 32646
  Description of Unknown: RightRegion for integrase B6691 sequence

SEQ ID NO: 32691 - DNA, 109 bp, Unknown
  Description of Unknown: RightRegion for integrase B6692 sequence
gtgaccaaaatcacttatgataagaagtcgcaaacccttgatttttcgctgtttctttgagttatagggtattgtagtatcgtccaccatactgactgattatgatctg

SEQ ID NO: 32692 - DNA, 260 bp, Unknown
  Description of Unknown: RightRegion for integrase B6693 sequence
acgggaaaaggggaatatttcaaaacagaaattttagaaacatcttttattgaaaagtaacgtgtgcaatatcggtacagatgtaccgatatccgtaagtgttgcggtcacctctttatatggcatggtataccgctgagataaataccgcattgatgcagcgagctccccgtccggtccaccaaatagcaataacatataatatttttacatattataaatatacacgaaaatgatacaatattcgcccctcagagagc

SEQ ID NO: 32693 - DNA, 260 bp, Unknown
  Description of Unknown: RightRegion for integrase B6694 sequence
cagtttatccgtcgcatcgaggtggcggaggacagcgcggagatcatctgggcggtgtaaaacaaatcgccgccgtccgcgccgatgcagccaatcaactcaaccgataacaaggaggaattgcacctatgaaaatcgaaaacaagacacctatcgcggaggagatcatccgcaacaaccccaccggccacggcctgttcgccggtatcggggacaacttcaacagcgtggcccaggtcatctgtgagctgatggacgac

SEQ ID NO: 32694 - DNA, 260 bp, Unknown
  Description of Unknown: RightRegion for integrase B6695 sequence
atcgactgggataaatctcaaaataccctcacgattcattaccgttttattatcccataattttttgcccgtaatcgtagttaagtggtatatggtggcccttacatcatttaactgtagatttgcctttaccgtcctcacatctcccggtacattgccagcagattcttgatctcctgtgtcttctctatctgcttttcgtggagatagtcgtagacggcagccatggcctcgggcggctctccattggagcgcttgta

SEQ ID NO: 32695 - DNA, 260 bp, Unknown
  Description of Unknown: RightRegion for integrase B6696 sequence
ctgattgaatctatagttatctatgaagatgctattaagatcacttggaagttccagtaattttaaggcttatttattttttgattttttgataaggcaagttattgtttctatatgatacagtatccatatgtcctgaaaacataataggttctttatgaacatcacctttcaataccgcataaatattccctgcttcaaagccttctataggcatttctctacactccatatgacattctttaaaaaccttcatcaaa

SEQ ID NO: 32696 - DNA, 260 bp, Unknown
  Description of Unknown: RightRegion for integrase B6697 sequence
caaacttttgaaaaaattgaagtaaatcaaggtaaaattgtaaaaattatattaaggtagttttctacctttttttattttagtttcacaagggaacatctgcgatactaaaaaataaattatttttccttattatatgtattattgtttatttttttataacttttattatctttttggttgactagtcaaccaagatatagtataatgttagtgtaaaaaataaatagcccaagtggctttaaaaaaggagaaaaaaa

SEQ ID NO: 32697 - DNA, 109 bp, Unknown
  Description of Unknown: RightRegion for integrase B6698 sequence
attgtattcgacaaagaaaacaaaaccttagatttctattattacgtaaaagaagattaagccatagcccattaattccgcagtattacttggtttgcatagtttatac

SEQ ID NO: 32698 - DNA, 260 bp, Unknown
  Description of Unknown: RightRegion for integrase B6699 sequence
aatatcacctggagcaaagccgccaacaccctcaccatccactaccgcctcgtcctttagccatgctcattttatggttaattgatatatggaggcccggacggagagctcggcgcgtcactgcgctacctctcccagcgctactccatgccctaccccgagctcaagggcctgctgaccgatatcggcacagaggaagcgtcatggcccccaattttggcgcggtatttttccagtccgtccagcacatagacccattt

SEQ ID NO: 32699 - DNA, 65 bp, Unknown
  Description of Unknown: RightRegion for integrase B6700 sequence
cccatgttggattcgaaccaacggccttctgctccggaggcagacgctctaatcccctgagctaa

SEQ ID NO: 32700 - DNA, 83 bp, Unknown
  Description of Unknown: RightRegion for integrase B6701 sequence
ccggatgggggttcgtgtaagtcgcaactggcggaggaggagggattcgaaccctcgtgaccttatacaggccaaacggtttt

SEQ ID NO: 32701 - DNA, 260 bp, Unknown
  Description of Unknown: RightRegion for integrase B6702 sequence
aaagagattgtttttgaccgcggcaaagggcatttacatattcatttttatatatcataggttattacagtccggcccaccatactgactcattataaactgagccatctgggcattgggctctttgatattaaccggaaattccaatctcttctcataaatccacattaatagcaccctccttcccatggccacggatcattaatccaggaccaatatgcagcatctgtattagcggaagctgtcaaaggtccaaactg

SEQ ID NO: 32702 - DNA, 260 bp, Unknown
  Description of Unknown: RightRegion for integrase B6703 sequence
ttaatagaatctatattaatctatgacgacgctatcgagataaactggaaattccagtaaatctcgtttatttatttttttatttttgacaggcaacagatagtctccacgtgagtagagggtagctgttgccctatctttctttttaagtaatatcaacgattacaggtttttaaattttccataatatgttatgatagaaaaaattatggagggtttatactatgagaacaaagaaacaaaaaacgaaaaacaaatac

SEQ ID NO: 32703 - DNA, 260 bp, Unknown
  Description of Unknown: RightRegion for integrase B6704 sequence
caaacttttgaaaaaattgaagtaaatcaaggtaaaattgtaaaaattatattaagataaataaatggcaaaaatttctatataaaaaaaggcaaaagtgttgacatattttaaaaaattgcatataatattattgcagatagatattttatgctgtatacttgtggtagcgaattaaagtttaagtgatatgttttatcatcgcccacaaggagccactttgtggctttttttattttaaaataaggagttacaattat

SEQ ID NO: 32704 - DNA, 109 bp, Unknown
  Description of Unknown: RightRegion for integrase B6705 sequence
attgtattcgataaagaaaacaaaaccttagatttctattattacataaaagaagattaagtcataactcctcaattccgcagtattacttggtttacagagtttatac

SEQ ID NO: 32705 - DNA, 260 bp, Unknown
  Description of Unknown: RightRegion for integrase B6706 sequence
aaaaagattgtatttgatcgtgagaataaaaccttggatttttactattatactaaataatttttttgctacttatgtacttacttagaggatgacgcagtggggttctaaatacttaggtgatcagggttatgcaccgattgagattttgagatattattatggagaaagtatgtatatcaataccgccgaacagatttctgggattccatcttcctggccgggatatgatttgacgattgggagcagcggagataaag

SEQ ID NO: 32706 - DNA, 260 bp, Unknown
  Description of Unknown: RightRegion for integrase B6707 sequence
aaagagattgtttttgaccgcggcaaagggcatttacatattcatttttatatatcataggttattgcagtccggcccgccatactgactcattataaactgagccatctgggcattgggctctttgatattaaccggaaattccaatctcttctcataaatccacattaatagcaccctccttcccatggccacggatcattaatccaggaccaatatgcagcatctgtattagcggaagctgtcaaaggtccaaactg

SEQ ID NO: 32707 - DNA, 260 bp, Unknown
  Description of Unknown: RightRegion for integrase B6708 sequence
aaagagattgtttttgaccgcggcaaagggcatttacatatacatttttatatatcataggttattaccgtccggcccaccatactgactcattataaactgagccatctgggcattgggctctttgatattaactggaaattccaatctcttctcataaatccacattaatagcaccctccttcccatggccacggatcgttaatccaggaccagtatgcagcatctgtattagcggaagctgtcaaaggtccaaactg

SEQ ID NO: 32708 - DNA, 260 bp, Unknown; identical to SEQ ID NO: 32703
  Description of Unknown: RightRegion for integrase B6709 sequence

SEQ ID NO: 32709 - DNA, 260 bp, Unknown
  Description of Unknown: RightRegion for integrase B6710 sequence
aataatcgttggaatagcaacattgatgatatgcagttaaaaatatatctgaaaatataattttttacttgaatgtataaaatctttatgctatgatgtaaaatatcaacggtaatcatataactgcatattcatttgtagttcgttgattactgtttattttttcccaaacaaaacacatttgcggttgtttcttccgcttatgcgcatacggctctcggagcgtgcgacatctcctgaaactgtcgggtattggcaag

SEQ ID NO: 32710 - DNA, 260 bp, Unknown
  Description of Unknown: RightRegion for integrase B6711 sequence
gataagataatctttcataaacatgatagcagccttgagctgtttttaattgatcagtaagcctatactctaatgaagtatgggggtgcagatggcgagttgggtgcctccctgcggtatctcagccagaaatttacgatggtaacgcctgaggcaaaggcaacgctgaatgacattgctacagaggaatatgtgtgttacatctatcagttattccattcatacagcagaataagaaaataaaaaccccatccttgatg

SEQ ID NO: 32711 - DNA, 260 bp, Unknown; identical to SEQ ID NO: 32622
  Description of Unknown: RightRegion for integrase B6712 sequence

SEQ ID NO: 32712 - DNA, 260 bp, Unknown
  Description of Unknown: RightRegion for integrase B6713 sequence
gaaaaagtaatctacaataaacacaccaacagcctagagctgtttttaattgacggataaacctataccatgattcaatatgggggtgcttacttcattaagatatatctgcataaaaataacaggatagccttagccgtcctgttatttgtcttttacgaatcccgtcctttttgtcttatgatgcccttgacattcttcatgtaaattattctttccgtctgctcaaaatctgtctagtatcgtatatcaaatcacaa

SEQ ID NO: 32713 - DNA, 260 bp, Unknown
  Description of Unknown: RightRegion for integrase B6714 sequence
aaagagattgtttttgaccgcggcaaagggcatttacatattcatttttatatatcataggttattgcagtccggcccaccatactgactcattataaactgagccatctgggcattgggctctttgatattaactggaaattccaatctcttctcataaatccacattaatagcaccctccttcccatggccacggatcgttaatccaggaccagtatgcagcatctgtattagcggaagctgtcaaaggtccaaactg

SEQ ID NO: 32714 - DNA, 260 bp, Unknown
  Description of Unknown: RightRegion for integrase B6715 sequence
gataagataatctttcataaacacgatagcagccttgagctgtttttaattgatcagtaagcctataccctaatgaagtatgggggtgcagatggcgagttgggtgcctccctgcggtatctcagccagaaatttacgatggtaacgcctgaggcaaaggcaacgctgaatgacattgctacagaggaattcgcccatttggagatgatgggcaccatcgtgcatcagctgacacaggggctaacaaaggacgaaattct

SEQ ID NO: 32715 - DNA, 260 bp, Unknown
  Description of Unknown: RightRegion for integrase B6716 sequence
gataagataatctttcataaacacgatagcagccttgagctgtttttaattgatcagtaagcctataccctaatgaagtatgggggtgcttacttcattaggatatagcaataaaaaaccccagatccgaaggacaccagagtacgttcaatggatcaatgtttgaaacaaaaacaatttaaaatggctgcctttcggcagccttatttatgaggtgtggaggaattgaacccccggcgtttatccttaataactgctac

SEQ ID NO: 32716 - DNA, 260 bp, Unknown
  Description of Unknown: RightRegion for integrase B6717 sequence
aaagagattgtttttgaccgcagtcaagggcatttacatattcatttttatatatcataggttattacagtccggcccaccatactgactcattataaactgagccatctgggcattgggctctttgatattaaccggaaattccaatctcttctcataaatccacattaatagcaccctccttcccatggccacggatcattaatccaggaccaatatgcagcatctgtattagcggaagctgtcaaaggtccaaactg

SEQ ID NO: 32717 - DNA, 260 bp, Unknown
  Description of Unknown: RightRegion for integrase B6718 sequence
aagacttttgaaaaaatagaagtaaatcaaggtaaaattgtaaaaattatattaaggtagttttctacctttttttattttagtttcacaagggaatacttgtgaaccatacataattaaataacctattccatatctagaaacaatgaattcacctacaattaccccaacccaactcataccaatattaatttttataatattaattatattggccatattagcaggaataatgagttttgttaaaatctgccatttac

SEQ ID NO: 32718 - DNA, 260 bp, Unknown
  Description of Unknown: RightRegion for integrase B6719 sequence
gataagataatctttcataaacatgatagcagccttgagctgtttttaattgaccaataaacctataccctaatgaagtatgggggtgcagatggcgagttgggtgcctccctgcggtatctcagccagaaatttacgatggtaacgcctgaggcaaaggcaacgctgaatgacattgctacagaggaattcgcccatttggagatgatgggcaccatcgtgcatcagctgacacaggggctaacaaaggacgaaattct

SEQ ID NO: 32719 - DNA, 260 bp, Unknown
  Description of Unknown: RightRegion for integrase B6720 sequence
aaagagattgtttttgaccgcggcaaagggcatttacatattcatttttatatatcataggttattgcagtccggcccaccggatgtcaataacatatgattaaattaagcccctggaatcatggttccggaggcttttctggttttattatagcatggatggaaggcaatgtcagtatgtttttggaaatctatttgaactaggccctatggatgccggtctgcaccaaaagaatcattccccatttattttcccgcat

SEQ ID NO: 32720 - DNA, 92 bp, Unknown
  Description of Unknown: RightRegion for integrase B6721 sequence
gacggctcttgtaccgttcacattggcgtacataaaattggtgctggtgaccggacttgaaccggtacgatattgctaccgagggattttaa

SEQ ID NO: 32721 - DNA, 260 bp, Unknown
  Description of Unknown: RightRegion for integrase B6722 sequence
gataagataatctttcataaacacgatagcagccttgagctgtttttaattgatcagtaagcctataccctaatgaagtatgggggtgcagatggcgagctgggtgcatccctgcggtatctcagccagaaatttacgatggtaacgcccgaggcaaaagcaacgctgaatgacattgctacagaggaatatgtgtgttgcatctatcaattattccattcatacagcagaataagaaaataaaaaccccatccttgatg

SEQ ID NO: 32722 - DNA, 260 bp, Unknown
  Description of Unknown: RightRegion for integrase B6723 sequence
ctcgtccgatacatagaactgaacgatgataccgtatatattcactggaagtttacatgatgaataaaaacaacaaaaagcagatgtaaaaacacatctgcttttttaatgtaatgtcatcagacaacatttttaatttttcgtgaaatctataaacggcaaatgatatgctgaatatggtgaagctgctgtcaattcaactaccatctgacgtatatatccaagcaacaatgcaggagcattttgatttagcaactgct

SEQ ID NO: 32723 - DNA, 109 bp, Unknown
  Description of Unknown: RightRegion for integrase B6724 sequence
aaaaaaattgtatttgatcgtgagaataaaaccttggatttttactattatactaaataatttttgctacttatgtacttgctgaaaggatgacgcagtggggttctaa

SEQ ID NO: 32724 - DNA, 260 bp, Unknown
  Description of Unknown: RightRegion for integrase B6725 sequence
ttatttatcgtaaaacattgtttcgggtttgttttgatactggaagacgtagacgcttagtctgcgtctttctttttgggttcagtgtaagtaagtgcctgtttggaatcggtcacaccagcggtagtagggtcagtgacgataccgaggatagccagcactgcgaacagagcattgactacctcaagcagtttgttacccaaatcaccgaggtcgagggtgtaaccaaacacggcggctaccacctgtaccagcaacag

SEQ ID NO: 32725 - DNA, 109 bp, Unknown; identical to SEQ ID NO: 32641
  Description of Unknown: RightRegion for integrase B6726 sequence

SEQ ID NO: 32726 - DNA, 109 bp, Unknown; identical to SEQ ID NO: 32641
  Description of Unknown: RightRegion for integrase B6727 sequence

SEQ ID NO: 32727 - DNA, 109 bp, Unknown
  Description of Unknown: RightRegion for integrase B6728 sequence
aaaaagattgtatttgatcgtgagaataaaaccttggatttttactattatactaaataatttttgctacttatgtacttacttagaggatgacgcagtggggttctaa

SEQ ID NO: 32728 - DNA, 109 bp, Unknown
  Description of Unknown: RightRegion for integrase B6729 sequence
aaagagattgtttttgaccgcggcaaagggcatttacatattcatttttatatatcataggttattgcagtccggcccaccatactgactcattataaactgagccatc

SEQ ID NO: 32729 - DNA, 260 bp, Unknown
  Description of Unknown: RightRegion for integrase B6730 sequence
aagacttttgaaaaaatagaagtcagtaatggcaaaattgttaaagttagtttgagataattaaatatggcgaattcgccataattataaatttatgaagatttgccaaaagattttttgcattcgattgcaaaaaaaagaagattaaataatttaatattctcgttgtgttttttaaaaaatagtgtataatataagtgcagataaatattaatgctgtatacctatgataccaaaccaaaagtttaagtgatatgtaa

SEQ ID NO: 32730 - DNA, 109 bp, Unknown
  Description of Unknown: RightRegion for integrase B6731 sequence
aaaaaaattgtatttgatcgtgagaataaaaccttagatttttactattatactaaataattttttgctacttatgcacttaccgagaggatgacgcagtggggttcta

SEQ ID NO: 32731 - DNA, 260 bp, Unknown
  Description of Unknown: RightRegion for integrase B6732 sequence
ctcgtccgatacatagaactgaacgatgataccgtatatattcactggaagtttacatgatgaataagaacgacaaaaagcagatgtgagaaccctcatctgctttttatcatgtaatgtcatcagacaaccgactcatccctgacatttaatccttcaagaaatgacaaatcaagtccatcatcctgaataaagtaagctccttttctctcttctgttctaaaattgtcactgtgtatgaactcttctctgcgttcaat

SEQ ID NO: 32732 - DNA, 109 bp, Unknown
  Description of Unknown: RightRegion for integrase B6733 sequence
aatatcacctggaacaaagccgccaacaccctcaccatccactaccgcctcgtcctttagccatgctcattttatggttaattgatatatggaggcccggacggcgagc

SEQ ID NO: 32733 - DNA, 260 bp, Unknown
  Description of Unknown: RightRegion for integrase B6734 sequence
ttatttatcgtaaaacattgtttcgggtttgttttgatactggaagacgtagacgtttagtctgcgtctttctttttgggttcagtgtaagtaagtgcctgtttggaatcggttacaccagcggtagtagggtcagtgacgataccgaggatagccagcactgcgaacagagcattgactacctcaagcagtttgttacccaaatcaccgaggtcgagggtgtaaccaaacacggcggctaccacctgtaccagcaacag

SEQ ID NO: 32734 - DNA, 260 bp, Unknown
  Description of Unknown: RightRegion for integrase B6735 sequence
ctgattaaagagattgtcgtagacgaagaagatcttcatgtctactggaaatttgcataaaatatacgtggaacccttgctatcactggcttgggttcttttgcgtattaagagaatcttctccaaagtagatgtacttaatatgcaatggcatccgtctctcttattattctaaaagttttatttattcaggtcaataacacgagcaaaaataaaaggccctgtcatagtggcagagcctctttttcttattcgcggga

SEQ ID NO: 32735 - DNA, 260 bp, Unknown
  Description of Unknown: RightRegion for integrase B6736 sequence
gagttcagcaaaaccgcttctacactggatttgctgtacaaattataccaaatggagtaagcacctccatattggcttattatattttttgctagttttggattagggcattttatatttataggatattgtaatactttattataggtccacattaaaaactccccctttcccaaggccatggttcctctaaccatctccatttattacatggaaatgcaattgtaagcggtccatatactttttgatatttatttgat

SEQ ID NO: 32736 - DNA, 260 bp, Unknown
  Description of Unknown: RightRegion for integrase B6737 sequence
gttgacaaagttgtctttgaccgcaaaacatcaagcattgaaatgtattacctgtgctgaaacggcatatttaggcgggtttagagggggtgtaactttttgaagtctggtggccctgacggcgaacttggtgcagcgcttcgctatctcaatcagcgttactcagccccctgtcgtgaagtgcaggcaatactcaacgatatcggcacagaagaacttgcccacatcgaaatgatcggcactattatctatcagctgac

SEQ ID NO: 32737 - DNA, 109 bp, Unknown
  Description of Unknown: RightRegion for integrase B6738 sequence
gttgacaaagttgtctttgaccgcaaaacgtcaagcattgagatgtattacctgtgctgaaacggcgtatttaggcggttttagagtgggtataactttttgaagcttg

SEQ ID NO: 32738 - DNA, 260 bp, Unknown
  Description of Unknown: RightRegion for integrase B6739 sequence
gttgacaaagttgtctttgaccgcaaaacgtcaagcattgaaatgtattacctgtgctgaaacggtgtatttagacggttttagagtgggtataactttttgaagtctggtggccctgacggcgagcttggtgcagcgcttcgctatctcaatcagcgttactcagccccctgccgtgaggtgcaggcaatactcaacgatatcggcacagaagaacttgcccacatcgaaatgatcggcactattatctatcagctgac

SEQ ID NO: 32739 - DNA, 109 bp, Unknown
  Description of Unknown: RightRegion for integrase B6740 sequence
gttgacaaagttgtctttgtccgcaaaacgtcaagcattgaaatgtattacctgtgctgaaacggcgtatttaggcggttttagagtgggtataactttttgaagtctg

SEQ ID NO: 32740 - DNA, 260 bp, Unknown
  Description of Unknown: RightRegion for integrase B6741 sequence
gttgacaaagttgtctttgaccgcaaaacgtcaagcattgaaatgtattacctgtgctgaaacggcgtatttaggcggttttagagtgggtataactttttgaagcttggtggtgcggactttaaaaagttatatataaaaaacgagaagtagtacaaactgcttctcgtttttttgctctagccttttcacatcgaaatacaataatcacattaagcaattatgcaatattaacaattatttcttgttagaaagataca

SEQ ID NO: 32741 - DNA, 109 bp, Unknown; identical to SEQ ID NO: 32739
  Description of Unknown: RightRegion for integrase B6742 sequence

SEQ ID NO: 32742 - DNA, 260 bp, Unknown
  Description of Unknown: RightRegion for integrase B6743 sequence
gttgacaaagttgtctttgaccgcaaaacgtcaagcattgagatgtattacctgtgctgaaatggcgtatttaggcggttttagaggggatataactttttgaagtctggtggccctgacggcgagcttggtgcagcgcttcgctatctcaatcagcgttactcagccccctgccgtgaggtgcaggcaatactcaacgatatcggcacagaagaacttgcccacatcgaaatgatcggcactattatctatcagctgac

SEQ ID NO: 32743 - DNA, 260 bp, Unknown
  Description of Unknown: RightRegion for integrase B6744 sequence
gttgacaaagttgtctttgaccgcaagacgtcaagcattgaaatgtattacctgtgctgaaatggcgtatttaggcggttttagagcgggtataactttttgaagtctggtggccctgacggcgagcttggtgcagcgcttcgctatctcaatcagcgttactcagccccctgccgtgaggtgcaggcaatactcaacgatatcggcacagaagaacttgcccacatcgaaatgatcggcactattatctatcagctgac

SEQ ID NO: 32744 - DNA, 260 bp, Unknown
  Description of Unknown: RightRegion for integrase B6745 sequence
gccacataccgcaaggcggacaattcgctgtccgtcatttatatgatggtcgttttataacttattgcagtttagaccgccgtactcctttaagttatgcaaaatatccccggagccgaagccccggggaaaactttatttaacctgcacaacgaacccgtcgaaaccggctttcttcagcttctgcatgtaagcttccgcatttgtgcgggaactgaacgcacctacctgcacgcgataaagttcactggatttctgca

SEQ ID NO: 32745 - DNA, 260 bp, Unknown
  Description of Unknown: RightRegion for integrase B6746 sequence
aaaaagattgtgttcgatcgtgaaaataaaacattagatttttactactatactcgataattttttgctttgtcgcacttgcagagcggatgacgcagtggggttctaaatacttaggcgatcagggatatgctccgattgagatcctgagatattattatggagagagtatgtacatcaataccgcagaacagatttcaggaatcccttcttcctggccgggatatgatctgacgatcggcagcagaggagataaggtt

SEQ ID NO: 32746 - DNA, 109 bp, Unknown
  Description of Unknown: RightRegion for integrase B6747 sequence
gttgacaaagttgtctttgaccgcaagacgtcaagtattgaaatgtattatctgtgttgaaacggcgtatttaggcggttttagagtgggtataactttttgaagtctg

SEQ ID NO: 32747 - DNA, 260 bp, Unknown
  Description of Unknown: RightRegion for integrase B6748 sequence
gttgacaaagttgtctttgaccgcaaaacgtcaagcattgagatgtattacctgtgctgaagcggcgtatttaggcggttttagagtgggtataactttttgaagtctggtggccctgacggcgagcttggtgcagcgcttcgttatctcaatcagcgttactcagccccatgtcgtgaggtgcaggcaatactcaacgatatcggcacagaagaacttgcccacatcgaaatgatcggcactattatctatcagctgac

SEQ ID NO: 32748 - DNA, 109 bp, Unknown
  Description of Unknown: RightRegion for integrase B6749 sequence
aaaaagattgtgttcgatcgtgaaaataaaacattagatttttactactatactcgataattttttgctttgtcgcacttgcagagcggatgacgcagtggggttctaa

SEQ ID NO: 32749 - DNA, 141 bp, Unknown
  Description of Unknown: RightRegion for integrase B6750 sequence
aaaaagattgtgttcgatcgtgaaaataaaacattagatttttactactatactcgataattttttgctttgtcgcacttgcagagcggatgacacagtggggttctaaatacttaggtgatcagggatatgctccgattg

SEQ ID NO: 32750 - DNA, 260 bp, Unknown
  Description of Unknown: RightRegion for integrase B6751 sequence
atcacatgggacaaggcgcagaacctcctgaccatccactaccggctcatgctggaataaattttgcccctaatcgtagtctgttaccatccggtggccctgacatcaacagactatgaaatgggcgcgttttcctaagttgaaatttcacaaaaggggtttacaaatacatttttgcgtaatatactataactaccgagagcgaaagctcccggtcagatagaattgacgtccgtcaatcaccatctgccctaaagagg

SEQ ID NO: 32751 - DNA, 109 bp, Unknown; identical to SEQ ID NO: 32746
  Description of Unknown: RightRegion for integrase B6752 sequence

SEQ ID NO: 32752 - DNA, 109 bp, Unknown
  Description of Unknown: RightRegion for integrase B6753 sequence
gttgacaaagttgtctttgaccgcaaaacatcaagcattgaaatgtattacctgtgctgaaacggcatatttaggcgggtttagagggggtgtaactttttgaagtctg

SEQ ID NO: 32753 - DNA, 260 bp, Unknown
  Description of Unknown: RightRegion for integrase B6754 sequence
tcaaaagttgatgttaccgctgataatatagatatcatatttaaattccaactcgcttaattgcgagtttttatttcgtttatctctatcaaagtaaaagcttttagctctttctgacggcattttttttcacaaattttaacgaataaaaatattttttgtattttctttaaaataaacttctttgttctttccattttttcatcctttctatattcccgaacccatatttgaatagatggggagtaacatggctgcat

SEQ ID NO: 32754 - DNA, 242 bp, Unknown
  Description of Unknown: RightRegion for integrase B6755 sequence
atcgactgggacaaggcccaaaaccagctgaccatccattaccgcctcctgcttgactgacctatttttttgccctccatcgtagtttaatgaagtaaggcccgccgtattgtgaaatgatcagcgcagccagacgcggattggtgttcttgatcttcaccggatattgcagcttcttttcatagacaaacatcagtcgttccctcctttatcccagggccatggatcatccaaccagcgga

SEQ ID NO: 32755 - DNA, 109 bp, Unknown
  Description of Unknown: RightRegion for integrase B6756 sequence
tggcaagcaaagacttcaacatcgagcgtgagcgcatcacaaaagccctcagcgaggtagactcccgcatcaacgagctggacattgccaatgccttcgacctgtcgct

SEQ ID NO: 32756 - DNA, 260 bp, Unknown
  Description of Unknown: RightRegion for integrase B6757 sequence
gagttcagcaaaaccgcttctacactggatttgcagtacaaattataccaaatggagtaagcacctccatattggcttattatattttttgctagttttggattagggcattttatatttataggatattgtaatactttattataggtccacattaaaaactccccctttcccaaggccatggttcctctaaccatctccatttattacatggaaatgcaattgtaagcggtccatatactttttgatatttatttgat

SEQ ID NO: 32757 - DNA, 260 bp, Unknown
  Description of Unknown: RightRegion for integrase B6758 sequence
atcacatgggacaaggcgcagaacctcctgaccatccactaccggctcatgctggaataaattttgcccataatcgtagtctgttaccatccggtggccctgacgtcaacagactacgaagcaagagcgtatatcactccaatctcgcttcatagcatttgacaaatcccgatgcctcgtctattctaatgccataaaggaggtatcgctatggattttgtcgatgtcgaatataccgaggtgcaggacgagcccatcac

SEQ ID NO: 32758 - DNA, 109 bp, Unknown
  Description of Unknown: RightRegion for integrase B6759 sequence
atcacatgggacaaggcgcagaacctcctgaccatccactaccggctcatgctggaataatttttgcccataatcgtagtctgttgccatccggtggcccggacggcga

SEQ ID NO: 32759 - DNA, 109 bp, Unknown
  Description of Unknown: RightRegion for integrase B6760 sequence
gttgacaaagttgtctttgaccgcaagacgtcaagtatcgaaatgtattatctgtgttgaaacggcgtatttaggcggttttagagtgggtataactttttgaagtctg

SEQ ID NO: 32760 - DNA, 260 bp, Unknown
  Description of Unknown: RightRegion for integrase B6761 sequence
gttgacaaagttgtctttgaccgcaaaacgtcaagcattgagatgtattacctgtgctgaaacggcatatttaggcgggtttagagggggtgtaactttttgaagtctggtggccctgacggcgaacttggtgcagcgcttcgctatctcaatcagcgttactcagccccctgtcgtgaagtgcaggcaatactcaacgatatcggcacagaagagcttgcccacatcgaaatgatcggcactattatctatcagctgac

SEQ ID NO: 32761 - DNA, 260 bp, Unknown
  Description of Unknown: RightRegion for integrase B6762 sequence
gcgtataatttcagcaacgccccccgcccaactttgtcaagactcttcagtaatttttgaagaatacgtttgttagctcacaaatgatgtgagacgctttaggagcttcgggcatctgacttcgcccgtagtatccatcagggccctgagcaattcaagcttggcttggttcggggaccttagcttaagcgtcatcctgggcatttcgttgtatctcctcgcccatctcgcgccctgctccctcaggtccttgagggaat

SEQ ID NO: 32762 - DNA, 109 bp, Unknown
  Description of Unknown: RightRegion for integrase B6763 sequence
cttatcgagagaatcgaaataaaggacggtagccaggtatcaatagtttggctcgcttaatttcaacatctctcacagttatttaggcaaaccgacgattccagctttt

SEQ ID NO: 32763 - DNA, 109 bp, Unknown
  Description of Unknown: RightRegion for integrase B6764 sequence
aaaaagattgtgttcgatcgtgaaaataaaacattagatttttactactatactcgataattttttgctttgtcgcacttgcagagcggatgacacagtggggctctaa

SEQ ID NO: 32764 - DNA, 260 bp, Unknown
  Description of Unknown: RightRegion for integrase B6765 sequence
atcacatgggacaaggcgcagaacctcctgaccatccactaccggctcatgctggaataatttttgcccctaatcgtagtctgttaccatccggtggcccggacggcgaattgggcgcttctctgcgctatctcagccagcggtactctatgccctacgctgagttgaagggcctgcttaccgacatcggtagagaagcctctgaaatgttccattcagaggctacggctttttttgatgcttttgcaaccgtatagctc

SEQ ID NO: 32765 - DNA, 109 bp, Unknown
  Description of Unknown: RightRegion for integrase B6766 sequence
aagtacattgtatataacagagcagatagcactctccaattctactattatctatcttaattaattccacccctacaaaaaacattataggtttcagcaattaggccct

SEQ ID NO: 32766 - DNA, 260 bp, Unknown
  Description of Unknown: RightRegion for integrase B6767 sequence
gccacataccgtaaggcggacaattcgctgtccgtcatttatatggtggttgttttataacttattgcagttaagtccgccgtactcctttaagttataaattcgcaaattctaactgcaaataactgcattcctaccccggacaccttgcaatccggcgcaaaatacgctataatataattgaggggaagcccagatctcacccctacctttgcgtaggacattgtgtttcctactaaccatataagctgcgccgtcct

SEQ ID NO: 32767 - DNA, 260 bp, Unknown
  Description of Unknown: RightRegion for integrase B6768 sequence
gctgtttatgacaatgaaaaagacactcttgatatatactttagattaatagaaaaatagggaatatcatcttatatagatgtcattccctatattctatgatagctacctctgatagcctatatgcctgtgaatctgttaatcttaattttgtttcactactatgtatttctgaatgatacttgcttctttctgaaggcaaatatgaaactactgctgaaacatccctgcactgccctacagttacagaaacaacattt

SEQ ID NO: 32768 - DNA, 260 bp, Unknown
  Description of Unknown: RightRegion for integrase B6769 sequence
gagttcagtaaaaccgcttctacactggatttgcagtacaaattataccaaatggagtaagcacctccatattggcttattatattttttgctagttttggattagggcattttatatttataggatattgtaatactttattataggtccacattaaaaactccccctttcccaaggccatggttcctctaaccatctccatttattacatggaaatgcaattgtaagcggtccatatactttttgatatttatttgat

SEQ ID NO: 32769 - DNA, 260 bp, Unknown
  Description of Unknown: RightRegion for integrase B6770 sequence
cgcttgtgtataggttgggggacgcctgatggcgtcccctttccgttttcgttgctgtgaaacgccgtattttgcgttttaaggcgttttaagcctgttggggtactcgtgtacccctcgggcttttttcgtgccttaaaacgcctctgaagcggtctgtggacattcgagcgcccatgcgcatctcgcatccgctcgatgcaagaaagcaacgactgcggcaagaggtacacgtgagggctgaccacatgaccggatga

SEQ ID NO: 32770 - DNA, 109 bp, Unknown
  Description of Unknown: RightRegion for integrase B6771 sequence
gttgacaaagttatctttgaccgcaaaacgtcaagtattgaaatgtattatctgtgttgaaacggcgtatttaggcggttttagagtgggtataactttttgaagtctg

SEQ ID NO: 32771 - DNA, 260 bp, Unknown
  Description of Unknown: RightRegion for integrase B6772 sequence
gttgacaaagttgtctttgaccgcaaaacgtcaagcattgagatgtattacctgtgctgaaatggcgtatttaggcggttttagagtgggtataactttttgaagtctggtggccccgacggcgagcttggtgcagcgcttcgctatctcaatcagcgttactcagccccctgtcgtgaagtgcaggcaatactcaacgatatcggcacagaagaacttgcccacatcgaaatgatcggcactattatctatcagctgac

SEQ ID NO: 32772 - DNA, 112 bp, Unknown
  Description of Unknown: RightRegion for integrase B6773 sequence
gttgacaaagttgtctttgaccgcaagacgtcaagcattgagatgtattatctgtgctgaaacggcgtatttaggcggttttagagtgggtataactttttgaagcttggtg

SEQ ID NO: 32773 - DNA, 260 bp, Unknown; identical to SEQ ID NO: 32734
  Description of Unknown: RightRegion for integrase B6774 sequence

SEQ ID NO: 32774 - DNA, 260 bp, Unknown
  Description of Unknown: RightRegion for integrase B6775 sequence
atcgactgggacaaggcccaaaaccagctgaccatccattaccgcctcctgcttgactgacctatttttttgccctccatcgtagtttaatgaagtaaggcccgccatacaccattagactatgattcaaatgttttgtttgacatttcgccgaaaaaggtctactcttgaaccacaatgcagaaaagagggatcgtcgtggaagttattgatgtcgattacgttgaagtgcccaatgaccccatcgaggagcaacctcc

SEQ ID NO: 32775 - DNA, 109 bp, Unknown
  Description of Unknown: RightRegion for integrase B6776 sequence
aaaatcgtgtatgataaaaaaggtggggtattgttgatgtttttttacattaacggctaacgccaaattgcccgcaagccctttatttatcggcgtttcagggcatcgt

SEQ ID NO: 32776 - DNA, 109 bp, Unknown
  Description of Unknown: RightRegion for integrase B6777 sequence
aaaattgtatatgataaaaaaggtggggcattgttgatgtatttttatattaacgactaacaccaaattgcccgcaattcctttatttatcggtgttccagggcatcgt

SEQ ID NO: 32777 - DNA, 260 bp, Unknown
  Description of Unknown: RightRegion for integrase B6778 sequence
ctgatcgataagatcgttgtcctgaatgaagatattgagattcactggacgttctgttaaaaagagcccggagaatgtccgagctctttcgtttattgaagttctagtaaacagattgtttctatatggaccgtgtttggaaactgatcgactgccgttgctttaattaccttgtatcctgcatctgcaagaatttcaaggtctcgtgcgagactggttggcttgcagctgatataaagcattctttcacacctatatga

SEQ ID NO: 32778 - DNA, 109 bp, Unknown
  Description of Unknown: RightRegion for integrase B6779 sequence
ctgatcgacaagattgttgttttgaatgaagatattgagattcactggacgttctgttaaaaagagcccggagaatgtccgagctcttttgcttattgaagttctagta

SEQ ID NO: 32779 - DNA, 260 bp, Unknown; identical to SEQ ID NO: 32777
  Description of Unknown: RightRegion for integrase B6780 sequence

SEQ ID NO: 32780 - DNA, 260 bp, Unknown
  Description of Unknown: RightRegion for integrase B6781 sequence
gagcaatggaacatagaaaaactgaataaatcagaatcggaacatagaaaaggagcatagagaaagtgacttatttggtggacactgaccgtatgcatactcacaccgctaaaaaatccgattggaatgggagtttttgggtatatggtgggttattctgtgtacggttatatgatttatattgaagcattttttactacataaatgattatcgttttgtctaaaacaccgcatagatataggaattatcataaacagaa

SEQ ID NO: 32781 - DNA, 260 bp, Unknown
  Description of Unknown: RightRegion for integrase B6782 sequence
ctgatcgacaagatcgttgttctgaatgaagatattgaaattcactggacgttctgctaaaaagagcccggagaatgtccgagctcttttgcttattgaagttctagtaaacagattgtttctatatggaccgtgtttgggaactgatcgaccgctgttgctttaattaccttgtatcctgcatctgcaagaatttcgaggtctcgtgcgagactggttggcttgcagctgatataaagcattctttcacacctatatga

SEQ ID NO: 32782 - DNA, 109 bp, Unknown
  Description of Unknown: RightRegion for integrase B6783 sequence
ctgatcgacaagatcgttgttctgaatgaagatattgaaattcactggacgttctgctaaaaagagcccggagaatgtccgagctcttttgcttattgaagttctagta

SEQ ID NO: 32783 - DNA, 260 bp, Unknown
  Description of Unknown: RightRegion for integrase B6784 sequence
accgctgctctgcgggagagttcgtgcagtattgcgtgtgccaaagaacgcttattttgatacaatgcaccctttaaaaggctatcgttttcctgtgagtagctaacgttttcttgtatgcacccgaaaggctatcattttcttttcacatttttgcattaatcggattcaaggacggcacaaggatgatgatggaaatatttgatgaatgaaataacggctgtggtcaaataaccgcagccgttatttggcttcaaaag

SEQ ID NO: 32784 - DNA, 260 bp, Unknown
  Description of Unknown: RightRegion for integrase B6785 sequence
ctgatcgataagatcgttgtcctgaatgaagatattgagattcactggacgttctgttaaaaagagcccggagaatgtccgagctcttttgcttattgaagttctagtaaacagattgtttctatatggaccgtgtttgggaactgatcgaccgctgttgctttaattaccttgtatcctgcatctgcaagaatttcgaggtctcgtgcgagactggttggcttgcagctgatataaagcattctttcacacctatatga

SEQ ID NO: 32785 - DNA, 109 bp, Unknown
  Description of Unknown: RightRegion for integrase B6786 sequence
aaaattgtatatgataaaaaaggtggggcattgttgatgtttttttacattaacggctaacaccaaattgcccgcaaaccctttatttatcggcgtttcagggcatcat

SEQ ID NO: 32786 - DNA, 260 bp, Unknown
  Description of Unknown: RightRegion for integrase B6787 sequence
aaaattgtatatgataaaaaaggtggggcattgttgatgtatttttatattaacgactaacaccaaattgcccgcaatccctttatttatcggtgtttcagggcatcgttatacgttatagcagtatggcggaggatattgcaataacgtatgacggtttttatatagaagaaagtggtgattttttatagaaatttagggaaataatcttagattttaaaaggcttataaaaaaattcgggagcacccacaacaaagtt

SEQ ID NO: 32787 - DNA, 260 bp, Unknown
  Description of Unknown: RightRegion for integrase B6788 sequence
cgtagtaaccgttggcacaaggtggattcgctcgaattaaagatttttcttaaattgtaaaatttgctattgaaaaaagaaagggggtgtgttatcttataaacagtaatcatacaaatgcagtttcatttgcagttcaatgattactgtttatttttttatccattaaacacgcaaaagtgcatttcccccgtgcttttgcgtcatatcccttttacgaccgagcggcaagtcgttaaactgcgggtgtggacgagcca

SEQ ID NO: 32788 - DNA, 109 bp, Unknown
  Description of Unknown: RightRegion for integrase B6789 sequence
gacagaaaaagcaataccctgacattttacctgtattgttccgattcccgcgagggctgatttgttatatgtacttacactatggtccaccatattgtgagagaatgat

SEQ ID NO: 32789 - DNA, 260 bp, Unknown
  Description of Unknown: RightRegion for integrase B6790 sequence
atttcggatatcgttgttgaccaggcgcaaaaggaaatccacttccactactatgcataagacatgccgcaagcccttattttatgcgggtttgtggcatcattataggtttctgccatacggtccaccatactggctcataatgaactgcgccatcttcgcattcggttcctttatatttaccggaaactgcaatcttttttcgtagacccacatcttagcatcctccttcccatggccatttttcagttacccagtcc

SEQ ID NO: 32790 - DNA, 260 bp, Unknown
  Description of Unknown: RightRegion for integrase B6791 sequence
atttcggatatcgttgttgatcaggcacagaaggaaattcatttccactattacgcataagcgccgcaaacccagataaaataggggtttgcggtattattataggttgctgccatacggtccaccatactggctcatgataaactgtgccatcttcgcattcggctccttaatattcaccggaaactgcagtcttttttcatagacccacatcttaacatcctccttcccacggccatttttcagttacccagttccag

SEQ ID NO: 32791 - DNA, 109 bp, Unknown
  Description of Unknown: RightRegion for integrase B6792 sequence
aaaattgtatatgataaaaaaggtggggcattgttgatgtatttttatattaacgactaacaccaaattgcccgcaatccctttatttatcggtgtttcagggcatcgt

SEQ ID NO: 32792 - DNA, 260 bp, Unknown
  Description of Unknown: RightRegion for integrase B6793 sequence
ctttccgaaattgtggtagaccgtcaaaaccgggaaatccacttccactactatgcataaaacatgccgcaatcccttattttatgcgggtttgcggcatcattctatgtttctgcactacggtccaccatactgactcataataaactgcgccatcttcgcattcggttcctttatatttaccggaaactgcaatcttttttcgtagacccacatcttagcatcctccttcccatggccatttttcagttacccagttc

SEQ ID NO: 32793 - DNA, 260 bp, Unknown
  Description of Unknown: RightRegion for integrase B6794 sequence
ttgatcgacaagattgtcgtcttgaacgaaaacgttgaaattcactggactttctgttagtataaaacccgcaaagccctatgctctgcgggttttcctatgtcacctatttgagacgcttatcaatatagtcgcagttagtggctagttcaaagttgccctgcccacgttgttcacccaaggaatcacaggtcagccgcgtccccttagccgaaacctatatctgtattttatttactcattttcattcttgccgcaaa

SEQ ID NO: 32794 - DNA, 109 bp, Unknown; identical to SEQ ID NO: 32791
  Description of Unknown: RightRegion for integrase B6795 sequence

SEQ ID NO: 32795 - DNA, 260 bp, Unknown
  Description of Unknown: RightRegion for integrase B6796 sequence
atattatggtatccagagcctggttctcgcaaaaatggagttataaaaattaaattttaaaatgatggtatttaagtatagtagtattatctgatttacttaaataccatcttttaagtttactaataatctatagaaatccttctctatttcacaaaggttattgcttttactttttttttcaccattttgtttacatttttcgtctttgctcatacctcattccaccctcttaagtttatgaataaattataccaaac

SEQ ID NO: 32796 - DNA, 165 bp, Unknown
  Description of Unknown: RightRegion for integrase B6797 sequence
gaatccataacctactacaaggaagatgagaaattagagtttgtattttatatctcttagcaaaaaagcccggaaatacgggcttttttgcgtatcatctgttactgtcatccggtccaccgaactgcagtaacatagaatacaatccattataataggaagaaa

SEQ ID NO: 32797 - DNA, 260 bp, Unknown
  Description of Unknown: RightRegion for integrase B6798 sequence
atttcggatatcgttgttgatcagacacagaaggaaattcatttccactattacgcataagcgccgcaaacccttattttatctgggtttgcggtattattataggtttctgcccttcggtccaccatactgactcataataaactgcgccatcttcgcattcggttcctttatatttaccggaaactgcaatcttttttcgtagacccacatcttagcatcctccttcccatggccatttttcagttacccagttccag

SEQ ID NO: 32798 - DNA, 260 bp, Unknown
  Description of Unknown: RightRegion for integrase B6799 sequence
aaaattgtatatgataaaaaaggtggggcattgttgatgtatttttatattaacgactaacaccaaattgcccgcaatccctttatttatcggtgtttcagggcatcgttatacgttatagcagtatggcggaggatattgcaataacgtatgacggtatttatatagaagaaagtggtgattttttatagaaatttagggaaataatcttagattttaaaaggcttataaaaaaattcgggagcacccacaacaaagtt

SEQ ID NO: 32799 - DNA, 109 bp, Unknown
  Description of Unknown: RightRegion for integrase B6800 sequence
aaaatcgtgtatgataaaaaaggtggggtattgttgatgtttttttacattaacggctaacaccaaattgcccgcaaaccctttatttatcggcgtttcagggcatcgt

SEQ ID NO: 32800 - DNA, 109 bp, Unknown
  Description of Unknown: RightRegion for integrase B6801 sequence
aaaatcgtgtatgataaaaaaggtggggcattattgatgtttttttacattaacgactaacgccaaattgcccgcaatccctttatttatcggtgtttcagggcatcgt

SEQ ID NO: 32801 - DNA, 109 bp, Unknown; identical to SEQ ID NO: 32791
  Description of Unknown: RightRegion for integrase B6802 sequence

SEQ ID NO: 32802 - DNA, 260 bp, Unknown
  Description of Unknown: RightRegion for integrase B6803 sequence
atttcggatatcgttgttgatcagacacagaaggaaattcatttccactattacgcataagcgccgcaaacccttattttatctgggtttgcggtattattataggtttctgcccttcggtccaccatactggctcataatgaactgcgccatcttcgcattcggttcctttatatttaccggaaactgcaatcttttttcgtagacccacatcttagcatcctccttcccatggccatttttcagttacccagttccag

SEQ ID NO: 32803 - DNA, 260 bp, Unknown
  Description of Unknown: RightRegion for integrase B6804 sequence
atttcggatatcgttgttgatcagacgaagaaggagattcatttccactattacgcataagcgccgcaaacccttattttatctgggtttgcggcattattataggtttctgccatacggcccaccatacgggctcatgataaactgtgccatcttcgcattcggctccttaatattcaccggaaactgcagtcttttttcatagacccacatcttaacatcctccttcccacggccatttttcagttacccagttccag

SEQ ID NO: 32804 - DNA, 109 bp, Unknown
  Description of Unknown: RightRegion for integrase B6805 sequence
aaaatcgtgtatgataaaaaaggtggggtattgttgatgtttttttacattaacggctaacaccaaattgcccgcaaaccctttatttatcggcgtttcagggcatcat

SEQ ID NO: 32805 - DNA, 260 bp, Unknown; identical to SEQ ID NO: 32784
  Description of Unknown: RightRegion for integrase B6806 sequence

SEQ ID NO: 32806 - DNA, 260 bp, Unknown
  Description of Unknown: RightRegion for integrase B6807 sequence
atttcggatatcgttgttgatcagacgaagaaggaaattcatttccactattacgcataataccgcaaacccttattttatctgggtttgcggtattattataggtttctgccatacggcccaccatactgactcataataaactgcgccatcttcgcattcggttcctttatatttaccggaaactgcaatcttttttcgtagacccacatcttagcatcctccttcccatggccatttttcagttacccagttccagg

SEQ ID NO: 32807 - DNA, 109 bp, Unknown
  Description of Unknown: RightRegion for integrase B6808 sequence
aaaattgtatatgataaaaaaggtggggcattgttgatgtatttttatattaacgactaacaccaaattgcccgcaatccctttatttatcggtgttccagggcatcgt

SEQ ID NO: 32808 - DNA, 109 bp, Unknown
  Description of Unknown: RightRegion for integrase B6809 sequence
aaaattgtatatgataaaaaatgtggggcattgttgatgtatttttatattaacgactaacaccaaattgcccgcaatccctttatttatcggtgttccagggcatcgt

SEQ ID NO: 32809 - DNA, 109 bp, Unknown
  Description of Unknown: RightRegion for integrase B6810 sequence
accgctgctctgcgggagagttcgtgcagtgttgcgtgtggtggaggcgacgagaattgaactcgtgtccgaaaacaaatccacacaactttctacgagcgtagtttat

SEQ ID NO: 32810 - DNA, 260 bp, Unknown
  Description of Unknown: RightRegion for integrase B6811 sequence
gaatccataacctactacaaggaagatgagaaattagagtttgtattttatatctcttagcaaaaaaagcccggaaatacgggcttttttcgtatcatctgttactgtcatccggtccaccgaactgactgatgattacctgggccatcttcggattggtctgggtaatttttacgggatattgtaaacgtttttcataattccacataaactaacaccctccttcctgccatggccatggttcctgaatccagttccat

SEQ ID NO: 32811 - DNA, 260 bp, Unknown
  Description of Unknown: RightRegion for integrase B6812 sequence
aaaattgtatatgataaaaaaggtggggcattgttgatgtatttttatattaacggctaacaccaaattgcccgcaaaccctttatttatcggcgtttcagggcatcattatacgttattgcagtacggtggtcctgacggcgaagcaggcgctgcaatgcgttatatgtcacaaaaatatgctatgtctaatcctaaagttgcaggacttttaaacgatatcgcaactgaagaacttggacatttagaaatagttggaa

SEQ ID NO: 32812 - DNA, 260 bp, Unknown
  Description of Unknown: RightRegion for integrase B6813 sequence
acctgcactttcgataagcaaaacatgctcctttccatcgtataccgctatgaaatctgactctttatctccatacctaaaattgtagtctattgatatccggtgggccagaccccagcagcctacaattccaccgcaaatgaaaacgcgcagcgaacttaaccgctgcgcgtttcccatattttcgtgtcatatctcattcacggcgcatgtaccgatccgttcggagcgctgctacaatcgaagaatttcgctttccc

SEQ ID NO: 32813 - DNA, 260 bp, Unknown
  Description of Unknown: RightRegion for integrase B6814 sequence
atttcagatatcgttgttgatcagacacagaaggaaattcatttccactattacgcataagcgccgcaaacccttattttatctgggtttgcggcattatcataggtttctaccataaggtccaccatactgactcataataaactgcgccatcttcgcattcggttcctttatatttaccggaaactgcaatcttttttcgtagacccacatcttagcatcctccttcccatggccatttttcagttacccagttccag

SEQ ID NO: 32814 - DNA, 109 bp, Unknown
  Description of Unknown: RightRegion for integrase B6815 sequence
aaaattgtatatgataaaaaaggtggggcattgttgatgtatttttatattaacgactaacaccaaattgcccgcaaaccctttatttatcggcgtttcagggcatcat

SEQ ID NO: 32815 - DNA, 109 bp, Unknown
  Description of Unknown: RightRegion for integrase B6816 sequence
aaaattgtatatgataaaaaaggtggggcattgttgatgtatttttatattaacggctaacaccaaattgcccgcaaaccctttatttatcggcgtttcagggcatcat

SEQ ID NO: 32816 - DNA, 109 bp, Unknown; identical to SEQ ID NO: 32776
  Description of Unknown: RightRegion for integrase B6817 sequence

SEQ ID NO: 32817 - DNA, 260 bp, Unknown
  Description of Unknown: RightRegion for integrase B6818 sequence
aaaattgtatatgataaaaaaggtggggcattgttgatgtatttttatattaacgactaacaccaaattgcccgcaatccctttatttatcggtgtttcagggcatcgttatacgttatagcagtatggcggagggtattgcaataacgtatgatgtttttttaagttaaaattggtgatgtttttggggattttttagaagtttttcttagatgttttaggattataaaaaattcgggagcacccacaacaaagttgtt

SEQ ID NO: 32818 - DNA, 109 bp, Unknown
  Description of Unknown: RightRegion for integrase B6819 sequence
aaaattgtatatgataaaaaaggtggggcattgttgatgtatttttatattaacgactaacaccaaattgcccgcaaaccctttatttatcggtgtttcagggcatcat

SEQ ID NO: 32819 - DNA, 109 bp, Unknown
  Description of Unknown: RightRegion for integrase B6820 sequence
aaaatcgtgtatgataaaaaaggtggggtattgttgatgtttttttacattaacggctaacaccaaattgcccgcaaaccctttatttatcggtgtttcagggcatcat

SEQ ID NO: 32820 - DNA, 260 bp, Unknown
  Description of Unknown: RightRegion for integrase B6821 sequence
attcaaaagattctcgtaaatgaagaggaaaactcttttgaaatcatatggaacttttaagccggtaaagctagtctttatcggcttttgttctgacaagttttgcaatcgcctcaacgtgagaggtttgagggaacatatctactggttgaacctttaccacctcatagcctaaagggcggaggatagctatatctcgggccatagaggccggattacaggacacataaaccatacgctttggcttcatgcccgccgct

SEQ ID NO: 32821 - DNA, 260 bp, Unknown
  Description of Unknown: RightRegion for integrase B6822 sequence
atttcggatattgttgttgaccaggcgcaaaaagaaattcatttccactattacgcataagcgccgcaaacccagataaaataagggtttgtggcattattataggtttctgcactacggtccaccatactgactcataataaactgcgccatcttcgcattcggttcctttatatttaccggaaactgcaatcttttttcgtagacccacatcttagcatcctccttcccatggccatttttcagttacccagttccag

SEQ ID NO: 32822 - DNA, 260 bp, Unknown
  Description of Unknown: RightRegion for integrase B6823 sequence
attcagaaaatcatcgtaaacgaagaggataactcttttgaaatcatatggaacttttaagccggtaaagctagtctttatcggcttttgttctgacaagttttgcaatcgcctccacgtgagaggtttgagggaacatatctactggttgaacctttaccacctcatagcctaaaggacggaggatagctatatctcgggccatagaggccggattacaggacacataaaccatacgctttggcttcatgcccgccgct

SEQ ID NO: 32823 - DNA, 260 bp, Unknown
  Description of Unknown: RightRegion for integrase B6824 sequence
ctttccgaaattgtggtagaccgtcaaaaccgggaaatccacttccactactatgcataaaacatgccgcaatcccttattttatgcgggtttgcggcatcattctaggtttctgcactacggtccaccgtactggctcatgataaactgtgccatcttcgcattcggctccttaatattcaccggaaactgcagtcttttttcatagacccacatcttaacatcctccttcccacggccatttttcagttacccagttc

SEQ ID NO: 32824 - DNA, 260 bp, Unknown
  Description of Unknown: RightRegion for integrase B6825 sequence
aaaatcgtgtatgataaaaaaggtggggtattgttgatgtttttttacattaacggctaacaccaaattgcccgcaaaccctttatttatcggcgtttcagggcatcattatacgttattgcagtacggtggtcctgacggcgaagcaggcgctgcaatgcgttatatgtcacaaaaatatgctatgtctaatcctaaagttgcaggacttttaaacgatatcgcaactgaagaacttggacatttagaaatagttggaa

SEQ ID NO: 32825 - DNA, 74 bp, Unknown
  Description of Unknown: RightRegion for integrase B6826 sequence
gacggttcctgtaccgtaaacataggcgtacatttaagtcattgcggagacaggatttgaacctgcgacctccg

SEQ ID NO: 32826 - DNA, 260 bp, Unknown
  Description of Unknown: RightRegion for integrase B6827 sequence
aaaattgtatatgataaaaaaggtggggcattgttgatgtatttttatattaacgactaacaccaaattgcccgcaatccctttatttatcggtgtttcagggcatcgttatacgttatagcagtatggcggtcctgacggcgaagcaggcgctgcaatgcgttatatgtcacaaaaatatgctatgtctaatcctaaagttgcaggacttttaaacgatatcgcaactgaagaacttggacatttagaaatagttggaa

SEQ ID NO: 32827 - DNA, 260 bp, Unknown; identical to SEQ ID NO: 32781
  Description of Unknown: RightRegion for integrase B6828 sequence

SEQ ID NO: 32828 - DNA, 260 bp, Unknown
  Description of Unknown: RightRegion for integrase B6829 sequence
aggaataacaggtggcacaagtccggtgatttgtccttgaagatatttctcaaaatttgacgaaaacaaaatgttgcaaaaaaggaggtgatgcgctacaatataaactgtaatcttgtaaatgctgtttcatgtgcgtttgcatgattatggtttatttttttatccatcaaacacgcaaaagtgcatttcccccgtgcttttgtgttatatcttttaacgaccgagcggcaaaagtcgtaaaactgccgggtgtggac

SEQ ID NO: 32829 - DNA, 109 bp, Unknown
  Description of Unknown: RightRegion for integrase B6830 sequence
atttcggatatcgttgttgatcaggcacagaaggaaattcatttccactattacgcataataccgcaaacccagataaaagaagggtttgcggtattattataggtttc

SEQ ID NO: 32830 - DNA, 260 bp, Unknown
  Description of Unknown: RightRegion for integrase B6831 sequence
atttcggatatcgttgttgatcagacacagaaggaaattcatttccactattacgcataagcgccgcaaacccttattttatctgggtttgcggtattattataggtttctgccctttggcccaccatactgactcataataaactgcgccatcttcgcattcggttcctttatatttaccggaaactgcaatcttttttcgtagacccacatcttagcatcctccttcccatggccatttttcagttacccagttccag

SEQ ID NO: 32831 - DNA, 260 bp, Unknown
  Description of Unknown: RightRegion for integrase B6832 sequence
aaaatcgtgtatgataaaaaaggtggggcattgttgatgtatttttatattaacgactaacaccaaattgcccgcaacccctttatttatcggtgtttcagggcatcgttatacgttattgcagtacggtggtcctgacggcgaagcaggcgctgcaatgcgttatatgtcacaaaaatatgctatgtctaatcctaaagttgcaggacttttaaacgatatcgcaactgaagaacttggacatttagaaatagttggaa

SEQ ID NO: 32832 - DNA, 260 bp, Unknown
  Description of Unknown: RightRegion for integrase B6833 sequence
aaaattgtatatgataaaaaaggtggggcattgttgatgtatttttatattaacgactaacaccaaattgcccgcaatccctttatttatcggtgtttcatggcatcgttatacgttatagcagtatggcggtcctgacggcgaagcaggcgctgcaatgcgttatatgtcacaaaaatatgctatgtctaatcctaaagttgcaggacttttaaacgatatcgcaactgaagagcttggacatttagaaatagttggaa

SEQ ID NO: 32833 - DNA, 109 bp, Unknown; identical to SEQ ID NO: 32804
  Description of Unknown: RightRegion for integrase B6834 sequence

SEQ ID NO: 32834 - DNA, 260 bp, Unknown
  Description of Unknown: RightRegion for integrase B6835 sequence
aaaattgtatatgataaaaaaggtggggcattgttgatgtttttttacattaacgactaacaccaaattgcccgcaaaccctttatttatcggcgtttcagggcatcgttatacgttattgcagtacggtggaggatattgcaataacgtatgacggtttttatatagaagaaagtggtgattttttatagaaatttagggaaataatcttagattttaaaaggcttataaaaaaattcgggagcacccacaacaaagtt

SEQ ID NO: 32835 - DNA, 260 bp, Unknown
  Description of Unknown: RightRegion for integrase B6836 sequence
ctttccgaaattgtggtggaccgtcaaaaccgggaaatccactttcactactatgcataagacatgccgcaagcccttattttatgcggacttgcggcatcattataggtttctgcactacggcccaccatactgactcataataaactgcgccatcttcgcattcggttcctttatatttaccggaaactgcaatcttttttcgtagacccacatcttagcatcctccttcccatggccatttttcagttacccagttc

SEQ ID NO: 32836 - DNA, 260 bp, Unknown
  Description of Unknown: RightRegion for integrase B6837 sequence
gttgataaggtagtgtactctaaggaatccggaataatggatttttattttttgaattaacctactataactcgactatggcggtccggacggcgaagccggagcatcttttagatatctgtcgcagagatactcgatgaaagacagacgcgtagcgggagtgcttaccgatgtcggcacggaggaattggcgcatcttgagatagtcggtgccatggttcaccagctcacacgcgacctcacacctgaggagatagaga

SEQ ID NO: 32837 - DNA, 109 bp, Unknown
  Description of Unknown: RightRegion for integrase B6838 sequence
atgatgattgataaaatcctagtaggcgatgattcccctattcagattatttggaagtaactcaagaaactatttcttttctcgtcagcagcgtctgcatgaaccacgc

SEQ ID NO: 32838 - DNA, 260 bp, Unknown
  Description of Unknown: RightRegion for integrase B6839 sequence
gtcgataaagtaatatactctaaagagtccaatacaatggatttttatttttttaactaacataccacaacacgattacggcggtccggacggcgaagccggagcatctttcagatatctgtcgcagagatattcgatgaaagacagacgcgtagcgggagtattgacagatattggaactgaagaattggcgcatcttgagatagtcggtgccatggttcaccagctcacacgcgacctcacacctgaagagatagaga

SEQ ID NO: 32839 - DNA, 260 bp, Unknown
  Description of Unknown: RightRegion for integrase B6840 sequence
gtaaccgctgctctgcgggagagttcgtgcagtgttgcgtgtggtggaggcgatgcgtgactatctttttttgcgtattttcaagatttcggaagtgcgacaccacgcagatgcgtggtttttcgctatcaagatctttaaaaaattgttgtagatgaattcttcatgctctactttggatcgcttttacatagtatatcgtatgggggatgttaagtagcacagcatttttcaaatccgattaaaaactcttttttaag

SEQ ID NO: 32840 - DNA, 260 bp, Unknown
  Description of Unknown: RightRegion for integrase B6841 sequence
ttaattgataaaattgttgtcctgaatgaggacattgagattcactggactttctgttaatccggaagctccaggaggcagattgtctcaatgtgcacggtgtgcacgaactgatcaacgcagctcatccgcttcaccctgtatccagcagcctggaatgctacaaggtcgcgggcgaggctggttggcttgcaggcaatgtaaacaactttcttacacctatatgaatcaataatcttcgggagtgccttcgggtgaat

SEQ ID NO: 32841 - DNA, 109 bp, Unknown
  Description of Unknown: RightRegion for integrase B6842 sequence
aaaatcgtctacaacaagaaagaagattcaatttccatgtttttctacataaatgactaagcaaaaaaacacccgcaatccctttatttatcgtgggttgcggggtgta

SEQ ID NO: 32842 - DNA, 260 bp, Unknown
  Description of Unknown: RightRegion for integrase B6843 sequence
gggatacaagtcgaatggacgaatgacacaaagcgtgttattgacatcacatttttataatatttttttgcctattttgtttgtacataattcgcgggccaaacggcgcagaaattaaatacaaacaaaaatacagataaacccgccgaaatggcgggtttttgctttaggtgaattcgatttcggcggttgcctcgatctggattgcgcattccgcgttattggcgggggtgctgttaaaggtcggggcgcatgtaatc

SEQ ID NO: 32843 - DNA, 260 bp, Unknown
  Description of Unknown: RightRegion for integrase B6844 sequence
gacagaaaaagcaataccctgacattttacctgtattgttccgattcccgcgagggctgatttgttatatgtacttacactagggtccaccatattgtgagagaatgatctgcgcgatctttgcgtttggtgttttgatattgaccggatattccagacgcttttcataattccacatatttaacagtcgcctccttcccatggccatggctgctgcatccagttccatgcttcagttggtgaggcagaggctgtgtcaa

SEQ ID NO: 32844 - DNA, 260 bp, Unknown
  Description of Unknown: RightRegion for integrase B6845 sequence
cggataattgaaaagatagttgtgtatcctgataagtcggtggagatatttatgaagtaaaatataacgtgaatttgtgttatatttagtataagaggtaagcaagtcgcaaaacgtgttttgaagcaaataaacaaccgtgactatgtatcaaaagcggaggaagacggttccaagaatattatcaaatgcggagtggtatttaaaggtgaaatgtgctatgccgttgcggagtgatagaaaattataaaaagacttgt

SEQ ID NO: 32845 - DNA, 260 bp, Unknown
  Description of Unknown: RightRegion for integrase B6846 sequence
aaaattgagtataataaagaaaatgatactttgtacttcgatttgtatatggttgaatagtccgaaatttggttgttttttatgctatataccttacagaatacagttcagccaatggggttccaaggcacttggcgaccaagggtacacggccattgaaattctccgcaactactacggcgattccatttatattaattccaccgatgaaatctccggtattccatcctcgtatcccggctcgccgctccgtgtgggcg

SEQ ID NO: 32846 - DNA, 260 bp, Unknown
  Description of Unknown: RightRegion for integrase B6847 sequence
gtggaccgcatcattttcgacaataaaacaaaaacggtgaccatcgtgtactacgaatgacccctccatttactcttaattatagttttggttgaatgaatttttaggaaaaaatactattgaatatgcgcattgacaaatatgcacatacgtgtcataattcaagtagagaataggcagaaaggagtaacgattatggccactaattttcgatctgttccagttcaagcggtttgcaatacgatactgaaaaaatcgtt

SEQ ID NO: 32847 - DNA, 260 bp, Unknown
  Description of Unknown: RightRegion for integrase B6848 sequence
aaatacattgagtatgaccgcaaaaatgaccgtatggacgtgcattattacatatcctgaacaccattatgagaagttgacatttggcggacccgacggggagatgggggcctccatgcgctatctctcccagcgctacgccatgccctacaaggaatgtaagggcgcgctgaccgacatcggcactgaggaactgggccacctggaaattgtggctgccattatccaccagctgaccagaggtttaagcgcccaggagc

SEQ ID NO: 32848 - DNA, 109 bp, Unknown
  Description of Unknown: RightRegion for integrase B6849 sequence
cggataattgaaaaaatagttgtgtatccggataagtcggtggaaatatttatgaagtaaaatataacgttgataaaggtaaaaatttgtgttatacttacattatacg

SEQ ID NO: 32849 - DNA, 260 bp, Unknown
  Description of Unknown: RightRegion for integrase B6850 sequence
cggataattgaaaagatagttgtgtatcctgataagtcggtggagatatttatgaagtaaaatataacgttgataaaggtaaaaatttgtgttatacttacattatacaaatacgggaggcgagaatatgttattgacaaacggtaaaaagagaatacccataggctatgaagatttcaaacagcttatagacagcggcttctattatgttgataagtcaatgtttatctatgaacttctgcatagcggcggacagaata

SEQ ID NO: 32850 - DNA, 260 bp, Unknown
  Description of Unknown: RightRegion for integrase B6851 sequence
aaatgctattttgataaatcaaagatgctgctgacgatttcatacaatttcagcgtttgatttttatccccgaaatcttagtaagatggagtccgaccctccttactccatcttactaagattatttctttcgcacgatccccctataatacgcgcacagctttgcctccggaccggggccgtccttgtccatcagaaacgcctctgccagcgcagcgtaaaactccggacgattcacgccgaagtccacggcgacgccg

SEQ ID NO: 32851 - DNA, 260 bp, Unknown
  Description of Unknown: RightRegion for integrase B6852 sequence
aaaattgagtataataaagaaaatgatactttgtacttcgatttgtatatggttgaatagtccgaaatttggttgttttttatgctatacaccttgcagaatacagtttagccaatggggttccaaggcacttggcgaccaagggtacacggccattgaaattctccgcaactactacggcgattccatttatattaattccaccgatgaaatctccggtattccatcctcttatcccggctcgccactccgtgtaggcg

SEQ ID NO: 32852 - DNA, 260 bp, Unknown
  Description of Unknown: RightRegion for integrase B6853 sequence
aaaattgagtataataaagaaaatgatactttgtacttcgatttgtatatggttgaatagtccgaaatttggttgttttttatgctatacaccttacagaatacagttcagccaatggggttccaaggcacttggcgaccagggatacacagccatcgaaattctccgcaactactacggcgattccatttatattaattccaccgatgaaatctccggtattccatcctcttatcccggctcgccgctccgtgtaggcg

SEQ ID NO: 32853 - DNA, 260 bp, Unknown
  Description of Unknown: RightRegion for integrase B6854 sequence
ataaaaaaaattgttttcgaccgtcagatgaatgaatttcatttctactactatgcttagctgatcgtcacaaattatcaggctatttccagttgacataatactccattttttagtaaataacaatatatataaaaccccggaattccttgtaaacacaaggttttccgggcattcctataggtttatgcattttgggcccccggattgtaaaaacagataatgtattaaggtatctggctgcatactctgacagtgtg

SEQ ID NO: 32854 - DNA, 260 bp, Unknown
  Description of Unknown: RightRegion for integrase B6855 sequence
attgaaaagattgtatttgatagaaaagaaaacagtattgagattttctattatctataaaaacataaaaagccagtgatccgaatggatgcactggcttttatcataaggtatttatattagggccaccaaatataaataagatataaaaattttcacattgtacagcgggaggttttttataccctattgttttacttatcacaaacggtcagttctctgagatcctccatcaacttggtaactgtgccatttccacc

SEQ ID NO: 32855 - DNA, 109 bp, Unknown
  Description of Unknown: RightRegion for integrase B6856 sequence
attaaaaaaattgttttcgaccggcagatgaacgaattccatttctactactatgcgtagatgattaccacagaattccagactgtctcagttgacataatacaccatt

SEQ ID NO: 32856 - DNA, 260 bp, Unknown
  Description of Unknown: RightRegion for integrase B6857 sequence
gacagaaaaagcaataccctgacattttacctgtattgttccgattcccgcgagggctgatttgttatatgtacttacactagggtccaccttagtgcaagtacatataagccacaaaagcaaggtgtgtggtatgccgcggcaggttatctgccgcggtttcttcttattatttttatggaattcttttttcgaatgtttatatcaatatattaaaaaaagtcaagacttttttgtcgtttttcacaatgtgaaaatgt

SEQ ID NO: 32857 - DNA, 260 bp, Unknown
  Description of Unknown: RightRegion for integrase B6858 sequence
aaaattgagtataataaagaaaatgatactttatacttcgatttgtatatggttgaatagtccgaaatttggttgttttttatgctatataccttacagaatacagtttagccagtggggatccaaggcacttggtgaccagggatacacagccatcgaaattctccgcaactactacggcgattccatttatattaattccaccgatgaaatctccggtattccatcctcttatcccggctcgccgctccgtgtgggcg

SEQ ID NO: 32858 - DNA, 260 bp, Unknown
  Description of Unknown: RightRegion for integrase B6859 sequence
atgatgattgataaaatcctagtaggtgatgattcccctattcagattatttggaagtaactcaagaaactatttcttttctcgtcaagaaggaaatagaaacttaaacgtgcagatatacaaaaaagacctagggcaatcaccctaggtctttctgcgcctacccattttgccgaaatcggcaaataggtttacttcttatccagtgtgcccatcttgtccaacacggtcagcgtgcggcacaaatcttcggacacgtt

SEQ ID NO: 32859 - DNA, 260 bp, Unknown
  Description of Unknown: RightRegion for integrase B6860 sequence
ataaaaaaaattgttttcgaccgtcagatgaatgaattccatttctactactatgcttagcagattgtcacagattatcagactatctcgagttgacataacactccattttttagtaaataacaagatatataaacccccggaattccttgtaaatacaaggttttccgggctttcctataggtttacgcatttggggccaccatactgactcataataaacgtcgccattttcggattcggtgttgtaatatttaccg

SEQ ID NO: 32860 - DNA, 260 bp, Unknown
  Description of Unknown: RightRegion for integrase B6861 sequence
attaaaaaaattgttttcgaccggcagatgaacgaattccatttctactactatgcgtagatgattaccacagaattccagactgtctcagttgacataatacaccattttttagtaaataacaagatatataaaatgcccggaatcccttgtaaatacaaggttttccaggcattcctataggtttatgcattttgggccgccatactgactcataataaacgtcgccagcttaggattcggtgttgtaatatttaccg

SEQ ID NO: 32861 - DNA, 260 bp, Unknown
  Description of Unknown: RightRegion for integrase B6862 sequence
aaatgctattttgataaatcaaaaatgctgctgacggtttcatataatttcagcgtttgattttagccccgaaatcttagctagatggagtccggccctccttactccatcttactaagattattctttcggacgatccctctataatacgcgcacagctttgcctccgggccggggccgtccttgtccgtcagaaacgcctctgccagggctgcgtagaactccgggcggttcacaccgaagtccacggcgacgccgta

SEQ ID NO: 32862 - DNA, 260 bp, Unknown
  Description of Unknown: RightRegion for integrase B6863 sequence
cggataattgaaaatatagttgtgtatcctgataagtcggtggaaatatttatgaagtaaaatataacgtgaatttgtgttatatttagtataagaggaaacgtgttttgaagcaaataaacaaccgtgactatgcatcaaaagcgaaggaagacggttacaagaatattatcaaatgcgaagtagcatttaaaggtaaaatgtgctatgccgttgcggagttacagtaaattataaaaaaacttgttgtgagtagaaac

SEQ ID NO: 32863 - DNA, 260 bp, Unknown
  Description of Unknown: RightRegion for integrase B6864 sequence
aaaattgagtataataaagaaaatgatactttgtacttcgatttgtatatggttgaatagtccgaaatttggttgttttttatgctatacaccttgcagaatacagttcagccagtggggttccaaggcacttggcgaccaagggtacacgtccattgaaattctccgcaactactacggcgattccatttatattaattccaccgatgaaatctccggtattccatcctcttatcccggctcgccgctccgtgtgggtg

SEQ ID NO: 32864 - DNA, 260 bp, Unknown
  Description of Unknown: RightRegion for integrase B6865 sequence
aatggcgactgcgaccttgaagtaggcgtacatataaatggttgcgggagccagatttgaactgacgaccttcgggttatgagcagctctaacgcaagtgaaaaatcccatgcaacacaatcattttcagacttcatataccgcttttgccgacgagatgacgacgcagatgtcgacttaagtagtacaatgacaaaatgaggcacacactttccgctgttccttgaaaagtgtttctacaaacacgggaaatatttttg

SEQ ID NO: 32865 - DNA, 260 bp, Unknown
  Description of Unknown: RightRegion for integrase B6866 sequence
aatggtgactgtgaccttgaagtaggcgtacatataaatggttgcgggagccagatttgaactgacgaccttcgggttatgagcagctctaacgcaagtgaaaaatcccatgcaacacaatcattttcagacttcatataccgcttttgccgacgagatgacgacgcagatgtcgacttaagcagtgcaatgacaaaatgaggcacacactttccgctgtttcttgaaaagtgtttctacaaacacgggaaatatttttg

SEQ ID NO: 32866 - DNA, 109 bp, Unknown
  Description of Unknown: RightRegion for integrase B6867 sequence
gtggaccgcatcattttcgacaataaaacaaaaacggtgaccatcgtgtactacgaatgatcaccgataaaaaagagggcgtttctgctctctttttcgtttattacct

SEQ ID NO: 32867 - DNA, 260 bp, Unknown
  Description of Unknown: RightRegion for integrase B6868 sequence
aaaattgagtataataaagaaaatgatactttgtacttcgatttgtatatggttgaatagtccgaaatttggttgttttttatgctatacaccttacagaatacagttcagccaatggggttccaaggcacttggcgaccaagggtacacggccattgaaattctccgcaactactacggcgattccatttatattaattccaccgatgaaatctccggtattccatcctcgtatcccggctcgccgctccgtgtgggcg

SEQ ID NO: 32868 - DNA, 260 bp, Unknown
  Description of Unknown: RightRegion for integrase B6869 sequence
ttaattgataaaattgttgtcctgaatgaggacattgagattcactggactttctgttaatccggaagctccaggaggcagattgtctcaatgtgcacggtgtgcacgaactgatcaacacagctcatccgcttcaccctgtatccagcagcctggaatgctacaaggtcgcgggcgaggctggttggcttgcaggcaatgtaaacaactttcttacacctatatgaatcaataatcttcgggagtgccttcgggtgaat

SEQ ID NO: 32869 - DNA, 260 bp, Unknown
  Description of Unknown: RightRegion for integrase B6870 sequence
aaaatcgtctacaacaagaaagaagattcaatttccatgtttttctacataaatgactaagcaaaaaagcacccgcaatccctttatttatcgtgggttgcggggtgtattatacgttgttgatgtatggtggtcctgacggtgaggctagcgcagcgttcagatatatgtctcagaaattcacttttaaaaatcctagagttgcaggacttttaaatgatatagcatgtgaagaactttcacaccttgaaatagtggga

SEQ ID NO: 32870 - DNA, 109 bp, Unknown
  Description of Unknown: RightRegion for integrase B6871 sequence
ataaaaaaaattgttttcgaccgtcagatgaatgaatttcatttctactactatgcttagctgatcgtcacagattatcaggctatttccagttgacataatactccat

SEQ ID NO: 32871 - DNA, 109 bp, Unknown
  Description of Unknown: RightRegion for integrase B6872 sequence
ttaattgataaaattgttgtcctgaatgaggacattgagattcactggactttctgttaatccggaagctccaggaggcagatggtctccacatgtactgtgtggcaga

SEQ ID NO: 32872 - DNA, 260 bp, Unknown
  Description of Unknown: RightRegion for integrase B6873 sequence
aaaattgagtataataaagaaaatgatactttgtacttcgatttgtatatgattgaatagtccgaaatttggttgttttttatgctatataccttacagaatacagttcagccaatggggttccaagtcacttggcgaccaagggtacacggccattgaaattctccgcaactactacggcgattccatttatattaattccaccgatgaaatctccggtattccatcctcttatcccggctcgccgctccgtgtgggcg

SEQ ID NO: 32873 - DNA, 260 bp, Unknown
  Description of Unknown: RightRegion for integrase B6874 sequence
cggataattgaaaagatagttgtgtatccggataagtcggtggaaatatttatgaagtaaaatataacgttgataaaggtaaaaatttgtgttatacttacattatacgaatacgggaggcgagaatatgttattgacaaacggtaaaaagagaatacccataggctatgaagatttcaaacagcttatagacagcggcttttattatgttgataagtcaatgcttatctatgaacttctgcatagcggcggacagaata

SEQ ID NO: 32874 - DNA, 260 bp, Unknown
  Description of Unknown: RightRegion for integrase B6875 sequence
aaaattgagtataataaagaaaatgatactttgtacttcgatttgtatatggttgaatagtccgaaatttggttgttttttatgctatataccttacagaatacagttcagccagtggggttccaaggcacttggcgaccaagggtacacgtccattgaaattctccgcaactactacggcgattccatttatattaattccaccgatgaaatctccggtattccatcctcttatcccggctcgccgctccgtgtgggtg

SEQ ID NO: 32875 - DNA, 260 bp, Unknown
  Description of Unknown: RightRegion for integrase B6876 sequence
aaaatagtttatgataagaaaaatcattccttgttgatgtttttttatattaatgattgagtgaaaatgtccgcaacctcccataaataaaggggttgcgagcaatcgtcatacgttattgcagtatggtggacccgatggcgaagctagtgctgccatgcgttatatgtctcaaaaatatgccatgaaaaattcccgtgttgccggattgttgaacgatatcgcaactgaagaattggtggtttgactttatcatttat

SEQ ID NO: 32876 - DNA, 260 bp, Unknown; identical to SEQ ID NO: 32867
  Description of Unknown: RightRegion for integrase B6877 sequence

SEQ ID NO: 32877 - DNA, 260 bp, Unknown
  Description of Unknown: RightRegion for integrase B6878 sequence
aacggcgattgtgaccttgaagtaggcgtacatatggatggcaaagaacctaatctttaatacaatgaaacccttttagatttccgtttctttgctgttttgatgtttcgttgcatatacttgcaacattggcaatataaagattcttttattttctaatccacctatttatacatgttttcttcgcttgacaataaatgctatgattgatattaaaagaattacacccaatccaaatccaataccaatccagattctgt

SEQ ID NO: 32878 - DNA, 260 bp, Unknown
  Description of Unknown: RightRegion for integrase B6879 sequence
gaaaagattgtgtttgaccggcaggcagacagcatcgaaatctactattacatacaatgaatcggctttttaaagaggcaccggattttccggtgcctctttgtatcttgttgatgtctgggcctcccagctgtgagataatcaccttagcggcggcagcatcgggtcgggcaatctttaccggatattccagctttttgctataagtccacatcgcttactcctcccttctcctggtcagcgttcaggtcccacggcca

SEQ ID NO: 32879 - DNA, 109 bp, Unknown
  Description of Unknown: RightRegion for integrase B6880 sequence
ctcgcaaaaatcatatatcacaagcctgcgcaatcccttgagctttatttctatgcgtaaggagtttcccgcttcacatccgcgcacttgaaaattatatctaaaagca

SEQ ID NO: 32880 - DNA, 260 bp, Unknown
  Description of Unknown: RightRegion for integrase B6881 sequence
aacggtgattgtgatttggaagtaggcgtacatatttcgggttgcgggagccagatttgaactgacgacctccgggttatgagagatttattttatatttttgatacattttagacatacgcaaatcgtacaataatggcgatattgcgttatttttttatttcgatgtttatcagattacgcactgcatacataatattggggtcagttttggggtcaaaaaacgaatcattttttgacccgttcaattttgcaagtgt

SEQ ID NO: 32881 - DNA, 109 bp, Unknown
  Description of Unknown: RightRegion for integrase B6882 sequence
ataaaaaagatagtttacataaaagagagtaaaacgttctgcttttactactatgtatagccccggaagccttgatttataaggctttgcgggcacattatatgttttt

SEQ ID NO: 32882 - DNA, 260 bp, Unknown
  Description of Unknown: RightRegion for integrase B6883 sequence
atcatttttaacagaaaaaagaatttgtttgagatcgtgtaccgggatccgtttgcatagtatcgtactatatccttttgcaattagcaccgccaagcttcaaaaggatataatagaaacagatgcaactttttcgcactgaacttgtacttttatgtacaagtttcacgggattatagctactgataaggaaagtcaatttgtaaaagtgattagacaggtcgaacaaaataatacaacactatatattgtgttttttt

SEQ ID NO: 32883 - DNA, 260 bp, Unknown
  Description of Unknown: RightRegion for integrase B6884 sequence
ataaaagaaataatattatatcctgataagatggagattcactgggcttttgcaatttaacaatattatctaacgttgttcactactccaataaaaccaatgttaattggttcagcagcagtaccgacgtttttaatcgtatatggtttccagccataaggaatagagccgtctttttcgtgtacgttcgctataactaaatcaaaaccgccttttaactcgtcttgagaataatcttcgttgtattccttaacgatcgg

SEQ ID NO: 32884 - DNA, 260 bp, Unknown
  Description of Unknown: RightRegion for integrase B6885 sequence
aacggtgattgtgatttggaagtaggcgtacatatttcgggttgcgggagccagatttgaactgacgaccttcgggttatgagggatttatttcatatttttgatacatttcagatatacgcaaatcgtacgataatggcgatattgcgttatttttttattttgatgtttgtcagcttacgcattgtgtacactatattggggtcagttttggggtcaaaaacaattgaagcattatgagatgcatttcagaaattaaa

SEQ ID NO: 32885 - DNA, 109 bp, Unknown
  Description of Unknown: RightRegion for integrase B6886 sequence
tcattgatagataagattttagtcaagaaaggttttattaaaatcctatggaaaatttagtctttctttagaggtatttagatacaggcattgttacacgtgtaacaga

SEQ ID NO: 32886 - DNA, 260 bp, Unknown
  Description of Unknown: RightRegion for integrase B6887 sequence
gaattcatcgagcggatcgaactcgacggcaaccatgtcaacatcatttggaaggcctgatggggctgcacaattgcgtgcgcttcatcgggctctttcatagtctgcaccaattttttatcacgctacaaacatccgaataaagggtcgtcatacaatttgcgctccttgccatgagcaacaagaaagaaggatctcaatgaaaaatcgcattctgtccgtccgcctctcagaggacgaacgcaatgatcagtgaggag

SEQ ID NO: 32887 - DNA, 260 bp, Unknown
  Description of Unknown: RightRegion for integrase B6888 sequence
gaatttatcgagcgaatcgaactcgacggcaaccatgtcaacatcatttggaaggcctgatggggctgcacaattgcgtgcgcttcatcgggctctttcatagtctgcaccaattttttatcacgctacaaacatccgaatatctgccatcttttccctgggcaccaagtcgtataggccctgcacacggactctgcgcactgtcatctgcattttgtcgtgaactcggtctcctttgaagacggcaaaaagcacttcag

SEQ ID NO: 32888 - DNA, 260 bp, Unknown
  Description of Unknown: RightRegion for integrase B6889 sequence
aagagtttgagtataaaatttaatatacgtaaggaaatagaagaaattgtgaatagttaatgctaattacaaggtgtaattagcaaaatattttgtagtctaatattttacaccagtaaacttttgcttgttaactttttctgataaatggtatataaatataggtaatataaaaaataaatgaattgttgaatatattgttttaactatgggggtcgtcattttttggcggcctattttttttatgcataaatatataa

SEQ ID NO: 32889 - DNA, 260 bp, Unknown
  Description of Unknown: RightRegion for integrase B6890 sequence
gaatttatcgagcggatcgaactcgacggcaaccatgtcaacatcatttggaaggcctgatggggctgcacaattgcgtgcgcttcatcgggctctttcatagtctgcaccaattttttatcacgctacaaacatccgaataaaggggcgtcatacaatttgcgctccttgccacgagcaacaagaaagaaggatttcaatgaaaaatcgcattctgtccgtccgcctctcagaggacgaacgtaatgatcagagaggag

SEQ ID NO: 32890 - DNA, 109 bp, Unknown
  Description of Unknown: RightRegion for integrase B6891 sequence
aacgccacaaaagaaggagccgcctcgaggtgttcgagtacggctcaattagtggagtagacgggagtcgaacccgtgtccaaaagcctattccctgtccttctacgag

SEQ ID NO: 32891 - DNA, 109 bp, Unknown
  Description of Unknown: RightRegion for integrase B6892 sequence
atcatttttaacagaaaaaagaatttgtttgagatcgtgtaccgggatccgtttgcatagcgcattactatatccttttgcaattagcaccgcccaactgggtaatgat

SEQ ID NO: 32892 - DNA, 260 bp, Unknown
  Description of Unknown: RightRegion for integrase B6893 sequence
atagttatagacgaaaaaaatatgaaaatactactaacatacaatgaaagtcccttttgaaattaggcggtccaaacggggaacttggcgcttgcttaagatatctttgtcaaagatttactatgcctgatgaaaaaggaagaacactactttcagatattggttgtgaagaaattggtcactgcgaaatgatatcttctatgatgtatcaacttatgcgaggcgctagtattgaagaaataaaaagtgctggcttaaat

SEQ ID NO: 32893 - DNA, 260 bp, Unknown
  Description of Unknown: RightRegion for integrase B6894 sequence
aacggcgattgtgaccttgaagtaggcgtacatatgaatggttgcgggagccagatttgaactgacgaccttcgggttatgagcaactctaacgcaagtgaaaaatcccatgcaacacaatcattttcagacttcatataccgctttcgccgacgagatgacgacgcagatgtcgacttaagtagtacaatgacaaaatgaggcacacattttccgctgttccttgaaaagtgtttctacaaacacgggaaatatttttg

SEQ ID NO: 32894 - DNA, 109 bp, Unknown; identical to SEQ ID NO: 32881
  Description of Unknown: RightRegion for integrase B6895 sequence

SEQ ID NO: 32895 - DNA, 260 bp, Unknown
  Description of Unknown: RightRegion for integrase B6896 sequence
gaatttatcgagcgaattgaactcgacggcaaccatgtcaacatcatttggaaggcctgatggggctgcacaattgcgtgcgcttcatcgggctctttcatagtctgcaccaattttttatcacgctacaaacatctgaataaagggtcgtcatacaatttgcgctccttgccacgagcaacaagaaagaaggatttcaatgaaaaatcgcattctgtccgtccgcctctcagaggacgaacgaaatgatcagtgaggag

SEQ ID NO: 32896 - DNA, 260 bp, Unknown
  Description of Unknown: RightRegion for integrase B6897 sequence
gaattcatcgagcgaatcgaactcgacggcaaccatgtcaacatcatttggaaggcctgatggggctgcacaattgcgtgcgcttcatcgggctctttcacagtctgcaccaattttttatcacgctacaaacatccgaatatctgccatcttttccctgggcaccaagtcgtatatgccctgcacacggactctgcgcactgtcatctgcatcttgtcgtgaactcggtctcctttgaagacggcaaaaagcacttcag

SEQ ID NO: 32897 - DNA, 260 bp, Unknown
  Description of Unknown: RightRegion for integrase B6898 sequence
gaaaagcccagaagtttcaacgacttccgggcttttttgcgcccatttttagaggcgtgacaaaaagatgccaaaatgggctttggcaaattcgatggacctgtacctttacccaaggctttttgagccgcttttccgaggatttttcgggaaagcggctcgttcttgctctcggcaaaacgtagaatttgagcaggcttttttgttggtgttgctggatagacattccgagtgtatgtgccattgtgttgacacgggca

SEQ ID NO: 32898 - DNA, 109 bp, Unknown
  Description of Unknown: RightRegion for integrase B6899 sequence
gtcgaccacatcacctatgataaggctaatcagcgtctcgtcatatatttttacagttgatatatatctaaatgcagtacggcggccctgacggcgagctcggcgcgtc

SEQ ID NO: 32899 - DNA, 260 bp, Unknown
  Description of Unknown: RightRegion for integrase B6900 sequence
gaacaaatcatatatgataaggaatccggaaaaatgtcttttgacatcattatttcctgaatttcatccatccataaaaaagtgctatttcggcctttttaacatttttgtaatattttttctgagttaaaaatcccacaaacccgcataaacactgggtttgcggggctattatagggtactgcactccggtggcccggacggtgaaatcagcgcttccctgcgttatctttcccagcgttttaccatgccgaaccgaa

SEQ ID NO: 32900 - DNA, 109 bp, Unknown; identical to SEQ ID NO: 32881
  Description of Unknown: RightRegion for integrase B6901 sequence

SEQ ID NO: 32901 - DNA, 260 bp, Unknown
  Description of Unknown: RightRegion for integrase B6902 sequence
gagcagatcatatatgataaggaatccggaaaaatgtcttttgacatcattatttcctgaattgaaaatcccgcaaacccgcataaacactgggtttgcgaggctattatagggtactgcactccggtggcccggacggtgagatcggcgcttccctgcgttatctttcccagcgttttaccatgccgaaccgaacgacttctgctttgctcaacgacataggaacagaagaatcagctcatagctgttgtcattttaat

SEQ ID NO: 32902 - DNA, 260 bp, Unknown
  Description of Unknown: RightRegion for integrase B6903 sequence
cttgactggggaaaaggcaggtacgggaaaaaggacattaaagacatcacttttttttgaccgctgtatgttcttaattactgcacctaatggcgcgggcaagagcaccttggtcaagctgatgacgggcatcctgacgccgacgagcggcagctgcacggtggatgggcgcacgccgtgggcggagcggaaggcgcatgtgcgcagcctcggcgcagtgttcgggcagcggatgcagctctggtgggacgtgccgattc

SEQ ID NO: 32903 - DNA, 260 bp, Unknown
  Description of Unknown: RightRegion for integrase B6904 sequence
gaattcatcgagcggatcgaactcgacggcaaccatgtcaacatcatttggaaggcctgatggggctgcacaattgcgtgcgcttcatcgggctctttcacagtctgcaccaattttttatcacgctacaaacatccgaataaagggacgtcatacaatttgcgctccttgccacgagcaacaagaaagaaggatttcaatgaaaaatcgcattctgtccgtccgcctctcagaggacgaacgaaatgatcagagaggag

SEQ ID NO: 32904 - DNA, 260 bp, Unknown
  Description of Unknown: RightRegion for integrase B6905 sequence
gaatttatcgagcgaatcgaactcgacggcaaccatgtcaacatcatttggaaggcctgatggggctgcacaattgcgtgcgcttcatcgggctctttcatagtctgcaccaattttttatcacgctacaaacatctgaataaagggtcgtcatacaatttgcgctccttgccatgagcaacaagaaagaaggatttcaatgaaaaatcgcattctgtccgtccgcctctcagaggacgaacgcaatgatcagtgaggag

SEQ ID NO: 32905 - DNA, 260 bp, Unknown
  Description of Unknown: RightRegion for integrase B6906 sequence
aacggcgattgtgaccttgaagtaggcgtacatatgaatggaaacgcacgtcacaaatgatacaatgcacacccaccaagcaaagggagtgcgttctgcaccccacacccctcaaattttctgcaccaactccgtcccatctttcaaaacaaacacgatttttccatctcgatgcaccactgctttttctacagcagccagccacaactgcgtgtcaaattccggcagcatcccattttgtccgcttaatgctctttgaa

SEQ ID NO: 32906 - DNA, 260 bp, Unknown
  Description of Unknown: RightRegion for integrase B6907 sequence
aacggtgattgtgatttggaagtaggcgtacatatttcgggttgcgggagccagatttgaactgacgacctccgggttatgagggatttatttcacatttttgatacatttcagacatacgcaaatcgtacaataacggcgatattgcgttatttttttattttgatgtttgtcagcttacgcactgtgtacactatattggggtcagttttggggtcaaaaaacgaatcattttttgatccgttcgatcttacaagtat

SEQ ID NO: 32907 - DNA, 109 bp, Unknown
  Description of Unknown: RightRegion for integrase B6908 sequence
ataaaaaagatagtttacataaaagagagtaaaacattctgcttttactactatgtatagccctggaagccttgatttataaggctttgcgggcacattatatgttttt

SEQ ID NO: 32908 - DNA, 260 bp, Unknown
  Description of Unknown: RightRegion for integrase B6909 sequence
gttgaaaaggtcgtgtatgataaggcagcgaatagtattcggctgtttttgattgattgaatatataggtataccctaatgcagtatggcggttgcgatggggaatggggcgctgcccatcggtatttgagccagcgctattccatggtaacaccggaagccaaagccacactcaatgacattgccacagaagaattggggcatgcagaaatcatgggcaccatcgtccgccagcttatgcagggtctgaccaaagacca

SEQ ID NO: 32909 - DNA, 260 bp, Unknown
  Description of Unknown: RightRegion for integrase B6910 sequence
gaattcatcgagcggatcgaactcgacggcaaccatgtcaacatcatttggaaggcctgatggggctgcacaattgcgtgcgcttcatcgggctctttcatagtctgcaccaattttttatcacgctacaaacatccgaataaagggtcgtcatacaatttgcgctccttgccacgagcaacaagaaagaaggatttcaatgaaaaatcgcattctgtccgtccgcctctcagaggacgaacgtaatgatcagagaggag

SEQ ID NO: 32910 - DNA, 260 bp, Unknown
  Description of Unknown: RightRegion for integrase B6911 sequence
aacggcgattgtgaccttgaagtaggcgtacatatgaatggttgcgggagccagatttgaactgacgaccttcgggttatgagggatttatttcacattttcgatacatttcagacatacgcaaatcgtacgataatggcgatattgcgttatttttttattttgacgttcgtcagcttacgcactgcgtacagtatattggggtcagttttggggtcaaaattaatccatctatttgatttgccaacattcaatttcac

SEQ ID NO: 32911 - DNA, 260 bp, Unknown
  Description of Unknown: RightRegion for integrase B6912 sequence
aacggcgattgcgaccttgaagtaggcgtacatatggatggcaaagagcctaatctttaatacaatgcaactcttttagatttccgtttctttgctgttttgatgtttcgttgcatatacttgcaatatatgcaagtattatcactgaaataggtataataaaaaaagaacatttttgaaactaaaagggtgcattttttcatttataaagttatcgtttcggaattaattttgaaggcaaacctgtctgatgatatgtt

SEQ ID NO: 32912 - DNA, 260 bp, Unknown
  Description of Unknown: RightRegion for integrase B6913 sequence
ataaaagaaataatattatatcctgataagatggagattcactgggcttttgcaatttaacaatattatctaacgttgttcaccactccaataaaaccaatgttaattggttcagcagcagtaccgacgtttttaatcgtatatggtttccagccataaggaatagagccgtctttttcgtgtacgttcgctataactaaatcaaaaccgccttttaactcgtcttgagaatagtcttcgttatattccttaacgatcgg

SEQ ID NO: 32913 - DNA, 109 bp, Unknown
  Description of Unknown: RightRegion for integrase B6914 sequence
atagttgtagatgaaaaaaatatgaaaatactgctaacgtacaatgaaagtcccttttgaaattaggtggtccaaacggggaacttggcgcttgcttaagatatctttg

SEQ ID NO: 32914 - DNA, 260 bp, Unknown
  Description of Unknown: RightRegion for integrase B6915 sequence
tccgtgattttcgaccgcgaaaataacctactgcgggtgtattatcacgctgcgcagtaactccggcgcagtggtacatgttggtgtaaggcggtcgatacaccatcatgtactacttataactgattccacgcctcggccagctgcgggttgctctgcatggttgcgcgcagggcgtccggggcatgggtatccagtatgtcatgcaacacggtggcatgctgcttttcgtcccgccgaatcagctccagcagcatggc

SEQ ID NO: 32915 - DNA, 260 bp, Unknown
  Description of Unknown: RightRegion for integrase B6916 sequence
cttgactggggaaaaggcaggtacgggaaaaaggacattaaagacatcacttttttttgaccgctgtatgttcttaattactgcacctaacggcgcgggcaagagcaccttggtcaagctgatgacgggcatcctgacgccgacaagcggcagctgcatggtggatgggcgcacgccgtgggcggagcggaaggcacatgtgcgcagcctcggcgcggtgttcgggcagcgaatgcagctctggtgggacgtgccgattc

SEQ ID NO: 32916 - DNA, 109 bp, Unknown
  Description of Unknown: RightRegion for integrase B6917 sequence
atcatttttaacagaaaaaagaatttgtttgagatcgtgtaccgggacccgtttgcatagcgccctactatatccttttgcaattagcaccgcccaactgggtaatgat

SEQ ID NO: 32917 - DNA, 260 bp, Unknown
  Description of Unknown: RightRegion for integrase B6918 sequence
gaatttatcgggcggatcgaactcgacggcaaccatgtcaacatcatttggaaggcctgatggggctgcacaattgcgtgcgcttcatcgggctctttcacagtctgcaccaattttttatcacgctacaaacatccgaatatctgccatcttttccctgggcaccaagtcgtataggccctgcacacggactctgcgcactgtcatctgcattttgtcgtgaactcggtctcctttgaagacggcaaaaagcacttcag

SEQ ID NO: 32918 - DNA, 260 bp, Unknown
  Description of Unknown: RightRegion for integrase B6919 sequence
atagttgtagatgaaaaaaatatgaaaatactgctaacgtacaatgaaagtcccttttgaaattaggtggtccaaacggggaacttggtgcttgcttaagatatctttgtcaaagatttactatgcctgatgaaaaaggaagaacactactttcagatattggttgtgaagaaattggccattgtgaaatgatatcttctatgatgtatcaacttatgcgaggcgctagtattgaagaaataaaaagtgctggcttaaat

SEQ ID NO: 32919 - DNA, 260 bp, Unknown
  Description of Unknown: RightRegion for integrase B6920 sequence
cttgactggggaaaaggcaggtacgggaaaaaggacattaaagacatcacttttttttgaccgctgtatgttcttaattactgcacctaatggcgcgggcaagagcaccttggttaagctcatgacgggcatcctgacgccgacaagcggcagctgcacggtggatgggcgcacgccgtgggcggagcggaaggcacatgtgcgcagcctcggcgcagtgttcgggcagcggatgcagctctggtgggacgtgccgattc

SEQ ID NO: 32920 - DNA, 140 bp, Unknown
  Description of Unknown: RightRegion for integrase B6921 sequence
aacggcgattgtgaccttgaagtaggcgtacatatgaatggttgcgggagccagatttgaactgacgaccttcgggttatgagcagctctaacgcaagtgaaaaatcccatgcaacacaatcattttcagacttcatata

SEQ ID NO: 32921 - DNA, 260 bp, Unknown
  Description of Unknown: RightRegion for integrase B6922 sequence
aacggcgattgtgaccttgaagtaggcgtacatatgaatggttgcgggagccagatttgaactgacgaccttcgggttatgagatttataaagcactgcttttcgttctttttcataacgaaaaataaggaaaaacagttctttttcatgccatttctttgatatatatagtcattcataaagttttatgatttcataagggtatgcgtaagggtgcgaaataatgaactttttatatatgcaaaacagtttttgtgttg

SEQ ID NO: 32922 - DNA, 109 bp, Unknown
  Description of Unknown: RightRegion for integrase B6923 sequence
tcattgatagataagattttagtcaagaaaggttttattaaaatcctatggaaaatttagtctttctttaaaggtatttagatacaggcattgttacacgtgtaacaga

SEQ ID NO: 32923 - DNA, 260 bp, Unknown
  Description of Unknown: RightRegion for integrase B6924 sequence
gaaattcaagtggtctggacgaaggacaaaaaggagatcaaggacatcatatttttttgagattgtagttgtacataatttctgtaccgaatggcgcagaaattaaatacaaataaaacggcggcttcggtcgccgtttttctttgaaaaaatagttcttgataatccccgagctttttttattgacaaatccagaaaaaagcgcatcataatgacaaaatcgcaaaggggtgcttttatgggtttgttccgttttttgc

SEQ ID NO: 32924 - DNA, 260 bp, Unknown
  Description of Unknown: RightRegion for integrase B6925 sequence
accttgttttttgtaaaacactgtttcgggtttgttatgaatatagaggaggtaggttaaacgcctacctcctcttgttttgtttgtaagttattcttcttgttcttatacaagtagttaaagtagttgttctttggtttttgcgtgtaacttttgcatagtacgcgtgtatatagagaaagtttacgcaaaaaccgatttttaactactttaactactttaactactttaactactttaactactttacctgcggctgt

SEQ ID NO: 32925 - DNA, 260 bp, Unknown
  Description of Unknown: RightRegion for integrase B6926 sequence
accttgttttttgtaaaacactgtttcgggtttgttatgaatatagaggaggtaggttaaacgcctacctcctcttgttttgtttgtaagttattcttcttgttctcatacaagtagttaaagtagttgttctttggtttttgcgtgtaacttttgcatagtacgcgtgtatatagagaaagtttacgcaaaaaccgatttttaactactttaactactttacctgcgactgtttcagctccaagacagcggattcaatg

SEQ ID NO: 32926 - DNA, 260 bp, Unknown
  Description of Unknown: RightRegion for integrase B6927 sequence
tctttatttttcgtaaaacactgtttcggatttgttgtgcatatagaggaagtaggctaaacgcttgcttcctctttttgcgtcagcttcaattccagcacagccgcttcgataaggttttcgatttctgcggtgttgagggtgaagcctttgctgttcaaaaagtcaatgacgtactgcttcttttcttcacctctgccagcacccacataaatcatttcagccgcttccacggcaatgttcacccacatcataatgtt

SEQ ID NO: 32927 - DNA, 260 bp, Unknown
  Description of Unknown: RightRegion for integrase B6928 sequence
aaatgctgcttcgataaatcccgcatgcttctcaccgtttattataagcttaccttttgatatcttgatatccccttgatcttagtaatatggagtatggcccaccgtactccatcttactaatgttctatttcgcaatgtgctcatagtattccatgagctttttctccggccctgggccatccttatccagcagaaaagctttcgccagatctgcataaaactccgggcggtttacgccgtacctgacagctacgtcg

SEQ ID NO: 32928 - DNA, 260 bp, Unknown
  Description of Unknown: RightRegion for integrase B6929 sequence
gaaattcaggtggtctggtcgaaggataaaaaggagatcaaggacatcatatttttttgaaattgtagttgtacataatttctgtaccgaatggcgctgaaattaaatacaaacaaagcggcggcttcggtcgccgtttttctttgaaaaatagtccttgataatccccgggctttttttattgacaaatccagaaaaaagcgcatcataatggcaaaatcgcaaaggggtgcttttatgggtttgttccgctttttgca

SEQ ID NO: 32929 - DNA, 260 bp, Unknown
  Description of Unknown: RightRegion for integrase B6930 sequence
cgctgcaccttcgacaaatcccagatgctcctcgcgatctcttataaattcattttctgatgccttaattgtagcaagatggagtatggcccaccatactccatcttgctataatatttgaaatcactttctcagcacaaccccatgataataccccgccatcttcgcctccgggcctccggcatccttatccatgaggaacgcttttgcgaggtcggcgtagaactccggcctatcaaggccgtatttcgccgccacgg

SEQ ID NO: 32930 - DNA, 260 bp, Unknown
  Description of Unknown: RightRegion for integrase B6931 sequence
cgctgcacgttcgacaaatcccagatgctcctcgcgatctcttataaattcattttctgatactcttgattgtagcaagatggagtatggcccaccatattccatcttgctataatatttgaaatcactttctcagcacaatcccatgataataccccgccatcttcgcctccgctccgccggcgtccttatccatgaggaaggcttttgcaaggtcggcatagaattctggccggtcaaggccgtacttggcagccaca

SEQ ID NO: 32931 - DNA, 109 bp, Unknown
  Description of Unknown: RightRegion for integrase B6932 sequence
ctcgcaaaaatcatatatcacaagcctgcgcaatcccttgagctttatttctatgcgtaaggaggggcttaaatttcccgcttcacatccgcgcacttacaaattatat

SEQ ID NO: 32932 - DNA, 260 bp, Unknown
  Description of Unknown: RightRegion for integrase B6933 sequence
ggaattataaataaggttcaagtcacggctgataaagttgtcatcagatggaaagtataaagaattttagtgacctttatttctaccaaagtgaaagctttaaccttggctttttttaaatttgtcatgagttttttcattttaaaaatttacctccatattttgatacatgggcataagcattgccgcataaagtaaaacgataatcagggccacaaagataaaaaccagtggctgtactaagttcatggtgcggttga

SEQ ID NO: 32933 - DNA, 260 bp, Unknown
  Description of Unknown: RightRegion for integrase B6934 sequence
cgctgcacgttcgacaaatcccagatgctcctcgcgatctcttataaattcattttctgatactcttgattgtagcaagatggagtatggcccaccatactccatcttgctataatatttgaaatcactttctcagcacaattccatgataatacccggccatcttcgcctccggccctccggcatctttatccatgaggaacgctttggcgagatcagcgtaaaattccggccggtcaaggccgtacttggcagccaca

SEQ ID NO: 32934 - DNA, 260 bp, Unknown
  Description of Unknown: RightRegion for integrase B6935 sequence
accttgtttttcgtcaaacattgcttcggatttgttatgaacatagaggaggtaggctgattgtgcctacctcctcttgttgtatgaagttattgttcttgttcttggcgaagtagttaaagtagttgttcttgggtttttgcgtgtaacttttgcttagtatgcgcatatatagagaaagtttacgcaaaaaccgattttgaactacttttactacttctgctcggcctgtttcagctccaagacagcggactcaatga

SEQ ID NO: 32935 - DNA, 260 bp, Unknown
  Description of Unknown: RightRegion for integrase B6936 sequence
cgctgcaccttcgataagtcccaaatgctcctcgcgatctcttataaattcattttctgatactcttgattgtagcaagatggagtatggcccaccatactccatcttgctataatatttgaaatcactttctcagcacaattccatgataatacccggccatcttcgcctccgggcctccggcgtccttatccatgaggaaagctttggcgagatctgcgtaaaattctggccggtctaggccgtacttggcagctacg

SEQ ID NO: 32936 - DNA, 260 bp, Unknown
  Description of Unknown: RightRegion for integrase B6937 sequence
gagctgattgacaaggtacaagtcacatctgacaagatagtgatccgctggaaaatttgataaatttagttacgctatttcaaatcaaggtgtcttactctctcaaataatcgataattttactatcctacatttcaataagcgtaaaagcttttaccttatatgtttttaattttttcataaatgaacctccatattttgataaatcggcagcaacatggctgcgtaaagtaagacaatcacaagagccacaaagacaa

SEQ ID NO: 32937 - DNA, 260 bp, Unknown
  Description of Unknown: RightRegion for integrase B6938 sequence
atcagcaaaatcatatatgttaagccggaaaaccggcttgatattattttttatacttaaatcatctctttttgccgtcaagagggccggacggcgaattgggtgcgtcactgcgctacctttcccagcgctattctatgccgctgcccgaattaaaaggcctgctgacggatataggtgcagagcacacagaagcgcgcattttgctttcataagcgtttatttcctttacgccggcaagtatctgcacctgccatctg

SEQ ID NO: 32938 - DNA, 109 bp, Unknown
  Description of Unknown: RightRegion for integrase B6939 sequence
ctcgcaaaaatcatatatcacaagcctgcgcaatcccttgagctttatttctatgcgtaaggaggggcttaaaattcctgcttcacatccgcgcacttgaaaattatat

SEQ ID NO: 32939 - DNA, 260 bp, Unknown
  Description of Unknown: RightRegion for integrase B6940 sequence
accttgtttttcataaaacattgttttgggtttgtggtaaatatagaggaggtaggctgatttggcctacctcctcttgtcttgtaaacttattcttcttattcttatagaagtagttgaagtagtggttctttggtttttgcgtataacttttgcatagtacgcgcgtatatagagaaagtttacgcaaaaaccgattttgaactactttaactacttcatctgcgactgtttcagctccaagacagcggactcaatga

SEQ ID NO: 32940 - DNA, 260 bp, Unknown
  Description of Unknown: RightRegion for integrase B6941 sequence
ctaataaataaggtagaatatgatggagaaatcaataatttaaccatattttataactagtccctattgtaataaggtggtgctaacggcgagttagcagcagccttccgctatctaaatcaaagatatacaatgccagatgataaaggaaaagctttgcttaccgatattggaactgaagaactagcccatgttgaaatgatatccgctatgatatatcaactactaaatggcgccactctaaaagaattaaaagaagc

SEQ ID NO: 32941 - DNA, 260 bp, Unknown
  Description of Unknown: RightRegion for integrase B6942 sequence
cgctgcacgttcgacaaatcccagatgctcctcgcgatctcttataaattcattttctgatgcttttggttgtagtaagatggagtatggcccaccatactccatcttgctataatatttgaaatcactttctcagcacaattccatgataatacccggccatcttcgcctccggcccgccggcgtccttatccatgaggaacgctttggcgaggtcggcgtagaactccggccggtcgaggccgtacttggcagctacg

SEQ ID NO: 32942 - DNA, 260 bp, Unknown
  Description of Unknown: RightRegion for integrase B6943 sequence
cgctgcaccttcgacaaatcccagatgctcctcgcgatctcttataaattcattttctgatgccttgattatagcaagatggagtatggcccaccatactccatcttgctataatatttgaaatcactttctcagcacaattccatgataatacccggccatcttcgcctccggcccgccggcgtccttatccatgaggaacgctttggcgaggtcggcgtagaactccggccggtcgaggccgtacttggcagctacgc

SEQ ID NO: 32943 - DNA, 260 bp, Unknown
  Description of Unknown: RightRegion for integrase B6944 sequence
ctcgcaaaaatcatatatcacaagcctgcgcaatcccttgagctttatttctatgcgtaaggagtttctcgcttcacatccacgcacttacaaattatatctaaatacagtacagaccgccgtattgcgaaattataaggcttgcggcctgaggatcgcagtgctttatatttatgggatattgcaattttttaacataattaaacatagcttttctcctttcattattcaattcattttatgcaaagaagaaaatattg

SEQ ID NO: 32944 - DNA, 260 bp, Unknown
  Description of Unknown: RightRegion for integrase B6945 sequence
gaaattcaggtggtctggtcgaaggataaaaaggagatcaaggacatcatatttttttgaaattgtagttgtatataatttctgtaccgaagggtgataagaaaaccaaacacttgattccgactcataagggtacggctctggtaacagtcatgccggaacagattcagtccccctccatgacggcggattgggaagaaaaattgttactcattgaaaaaggcgaatatgccagcgaggattttatggatgagatcaaa

SEQ ID NO: 32945 - DNA, 260 bp, Unknown
  Description of Unknown: RightRegion for integrase B6946 sequence
cgctgcaccttcgacaaatcccagatgctcctcgcgatctcttataaattcattttctgatgctctttattgtagcaagatggagtatggcccaccatactccatcttgctataataattgaaatcactttctcagcacaaccccatgataatacccggccatcttcgcctccggccctccggcgtccttatccatcaagaacgctttggcgaggtcggcgtagaactccggcctatcaaggccgtatttcgacgccacg

SEQ ID NO: 32946 - DNA, 260 bp, Unknown
  Description of Unknown: RightRegion for integrase B6947 sequence
cgctgcacgttcgacaaatcccagatgctcctcgcgatctcttataaattcattttctgatgccttaattgtagcaagatggagtatggcccaccatactccatcttgctataataattaaaatcactttctcagcacaatcccatgataatacccggccattttttcctccgggcctccggcatccttgtccatcaggaacgctttggcgaggtcggcgtaaaattccggccggtcaaggccgtatttcgccgccacgg

SEQ ID NO: 32947 - DNA, 260 bp, Unknown
  Description of Unknown: RightRegion for integrase B6948 sequence
gaaattcaggtggtttggtcgaaggataaaaaggagatcaaggacatcatatttttttgagattgtagttgtacataatttctgtaccgaacggcgcagcaattaaacacaaacacaataaacataaaaaagagccggggatcactccccggctttttcgtgttccaagtctgccagcctgtggttgatcaccttgatctgttcctccactaccggaattcgttgggcgaaattgttgtgcgccctcacttcccgcgtca

SEQ ID NO: 32948 - DNA, 260 bp, Unknown; identical to SEQ ID NO: 32935
  Description of Unknown: RightRegion for integrase B6949 sequence

SEQ ID NO: 32949 - DNA, 260 bp, Unknown
  Description of Unknown: RightRegion for integrase B6950 sequence
cgctgcaccttcgacaaatcccagatgctcctcgcgatctcttataaattcattttctgatactctctattgtagcaagatggagtatggcccaccatactccatcttgctacaatatttgaaatcactttctcagcacaaccccatgataatacccggccatcttcgcctccgggcctccggcgtccttatccatgaggaaggcttttgcaaggtcggcatagaattctggccggtcaaggccgtacttggcagctacg

SEQ ID NO: 32950 - DNA, 109 bp, Unknown
  Description of Unknown: RightRegion for integrase B6951 sequence
ctcgcaaaaatcatatatcataagcctgcgcaatcccttgaactttatttctatgcgtaatgtccccgggcttaaaatcctcgcttcacatccgcacgcttgaaaacta

SEQ ID NO: 32951 - DNA, 260 bp, Unknown
  Description of Unknown: RightRegion for integrase B6952 sequence
gttcgtacaaaatgcaaatggtgcccccagcgggattcgaacccgcgatatccaccttgaaagagctgcaccctaacgtgcaagcagataatggcagttcaaaggcgaacgtcttaactggggttttaatgcaacgcgatacaaagcgccgcaaagtagtacactgcattttgcggcggttttgcggcgcattttgcggcgcggcgagtgaacggagataccgcgatgcactacacgagcgtacggattagggaacgcaa

SEQ ID NO: 32952 - DNA, 260 bp, Unknown
  Description of Unknown: RightRegion for integrase B6953 sequence
gggcttataaacaaggttcaggtaacagctgaggacattgttatcaattggaaaatataactaattttactaaccttcatttcaaagagcgtggctctgctagccttgaggaaaacccttatatttggcagttggagaaaatgaatgagatggggctactcaatgatgataatgtcaagctcatttctgatcgttcaggcattgctgaggagcaacttagacatgttatccaaaatgagggctataaggtctataaagac

SEQ ID NO: 32953 - DNA, 109 bp, Unknown
  Description of Unknown: RightRegion for integrase B6954 sequence
tcattgatagataagattttagtcaagaaaggttttattaaaatcctatggaaaatttagtctttctttagaggtatttggatacaggcattgttacacgtgtaacaga

SEQ ID NO: 32954 - DNA, 260 bp, Unknown
  Description of Unknown: RightRegion for integrase B6955 sequence
cgctgcaccttcgacaaatcccagatgctcctcgcgatctcttataaattcattttctgatgccttgattgtagcaagatggagtatggcccaccatactccatcttgctataatatttgaaatcactttctcagcacaattccatgataatacccggccatcttcgcctccggcccgccggcgtccttatccatgaggaacgctttggcgaggtcggcgtagaactccggccggtcgaggccgtacttggcagctacgc

SEQ ID NO: 32955 - DNA, 260 bp, Unknown
  Description of Unknown: RightRegion for integrase B6956 sequence
accttgttttttgtaaaacactgtttcgggtttgttatgaatatagaggaggtaggttaaacgcccacctcctcttgttttgtttgtaagttattcttcttgttcttatacaagtagttaaagtagttgttctttggtttttgcgtgtaacttttgcatagtacgtgcgtatatagagaaagtttacgcaaaaaccgattttgaactactttaactactttacctgcgactgtttcagctccaagacagcggattcaatg

SEQ ID NO: 32956 - DNA, 260 bp, Unknown
  Description of Unknown: RightRegion for integrase B6957 sequence
ctaataaacaaggtagaatatgaagaaaaaaccaataatttggtcatattttataattagtccctattacaatacggtggtgcaaatggagagttaggagctgctttaagatatttaaatcaaagatatacgatgcccgatgaaagaggaaaggctttgcttactgatattggaaccgaggaattgacacaataagtttatcataaataaaagccacaagtaaaatagagcaaaaaaaaagaaaggtaaccgacaattat

SEQ ID NO: 32957 - DNA, 260 bp, Unknown
  Description of Unknown: RightRegion for integrase B6958 sequence
ttattccccatcgggaatgcgttcggatttttcatttttatcaaggatatttcctactgatgtttatccccggaggattttttatcctccgggtttttcttttatttgcacattcgattcctgaccgctctcctgctacaatgattgcagaaaatcattaggaggacggaacaatgaaaaaattcatcacagacgaaaggacagacttgcactatgagcttgtcggggactactaccttatcgccggggaggacgagccg

SEQ ID NO: 32958 - DNA, 260 bp, Unknown
  Description of Unknown: RightRegion for integrase B6959 sequence
attgcaaaaatcgtatatcataagctggcgcaatcccttgagctttatttctatgcgtaaggagtttcccgcttcacatccgcgcacttacaaattatatctaaatgcagtacagtccgccgtattgagaaattataaggcttgcggcctgaggatcgcagtgctttatatttatgggatattgcaattttttaacataattaaacatagcttttctcctttcattattcaattcattttatgcaaagaagaaaatattg

SEQ ID NO: 32959 - DNA, 260 bp, Unknown
  Description of Unknown: RightRegion for integrase B6960 sequence
gggcttataaacaaggttcaggtaacagctgaggacattgttatcaagtggaaaatatagataattttagtaacctacatttccacaagcgtgaaagctttaaccttagcttttttcaagaatgtcatcatttttttcattttaaaaatttacctccatattttgatacatgggcataagcattgccgcataaagtaaaacaataatcagagccacaaagataaagaccagtggctgcaccagattcatggcgcggttaa

SEQ ID NO: 32960 - DNA, 260 bp, Unknown
  Description of Unknown: RightRegion for integrase B6961 sequence
cgctgcaccttcgacaaatcccagatgctcctcgcgatctcttataaattcattttctgatgccttaattgtagcaagatggagtatggcccaccatactccatcttgctataataattgaaatcactttctcagcacaaccccatgataatacccggccatcttcgcctccgggcctccggcgtccttgtccatcaggaacgctttggcgaggtcggcgtagaactccggccggtcgaggccgtacttggcagctacgc

SEQ ID NO: 32961 - DNA, 260 bp, Unknown
  Description of Unknown: RightRegion for integrase B6962 sequence
tcattgatagataagattttagtcaagaaaggttttattaaaatcctatggaaaatttagtctttctttagaggtatttagatacaggtattgttacacgtgtaacagatttctcatttgacgtcgtcacaagctcaggctgcgccgtcaaacgaccaatcataataactttattgtacatcattacctccttatcttattattcgaaaaagaatctagaaaacagtaaattaatgtagcaaaaaagtcctagtttccta

SEQ ID NO: 32962 - DNA, 260 bp, Unknown
  Description of Unknown: RightRegion for integrase B6963 sequence
ttaataaacaaggtcgagtatgacccaacctctaacactttagagttatattataactaatgtcccttttgtgatacggtggttctaatggagagctagcagctgctcttcgttatttaaatcaaagatatactatgcctgataatcggggaaaagctttacttactgatattgggacagaagaacttgctcatgtagagatgattgcgactatggtttatcagctaacaaaagatgcaacacctgaagagatgaagcaa

SEQ ID NO: 32963 - DNA, 174 bp, Unknown
  Description of Unknown: RightRegion for integrase B6964 sequence
gagctgattgacaaggtgcaagtcacttctgacaagatagtgatacgctggaaaatttgataaatttggttacgctattttcaataagtgtaaaggcctttaccttataggtttttaattttttcataaatgaacctccatattttgataaatcggcagcaacatggctgcata

SEQ ID NO: 32964 - DNA, 260 bp, Unknown
  Description of Unknown: RightRegion for integrase B6965 sequence
gtaaaaaagattatttatgatagacaaaatggggaatttaaggtaatatactatgtatagagaaaccctcaggaagccgcataaacaaaggctttctgagggttttataggtttttgcagtccgggccaccatactgactcataatatactgtgcgatctttggattcggctgcgtaatttttaccgggtactgcaggcgtttttcatatttccacatgtgcagattcctccttcccatggccatgcgctgttgatccag

SEQ ID NO: 32965 - DNA, 260 bp, Unknown
  Description of Unknown: RightRegion for integrase B6966 sequence
accttgttttttgtaaaacactgtttcgggtttgttatgaatatagaggaggtaggttaaacgcctacctcctcttgttttgtttgtaagttattcttcttgttcttatacaagtagttaaagtagttgttctttggtttttgcgtgtaacttttgcatagtacgtgcgtatatagagaaagtttacgcaaaaaccgattttgaactactttaactactttacctgcgactgtttcagctccaagacagcggattcaatg

SEQ ID NO: 32966 - DNA, 260 bp, Unknown
  Description of Unknown: RightRegion for integrase B6967 sequence
cgctgcacgttcgacaaatcccagatgctcctcgcgatctcttataaattcattttctgataccttgattgtagcaagatggagtatggcccaccatactccatcttgctataatatttgaaatcactttctcagcacaaccccatgataatacccagccattttttcttccggccctccggcgtccttatccatgaggaaggcttttgcaaggtcggcatagaattccggcctatcaaggccgtatttcgccgcgacgg

SEQ ID NO: 32967 - DNA, 260 bp, Unknown
  Description of Unknown: RightRegion for integrase B6968 sequence
tctttatttttcgtaaaacactgtttcggatttgttgtgcatatagaggaagtaggctaaacgcttgcttcctctttttgcgtcagcttcaattccagcacagccgcttcgataaggttttcaatttctgcggtattgagggtgaagcctttgctgttcaaaaagtcaatgacgtactgcttcttttcttcacctctgccagcacccacataaatcatttcagccgcttccacggcaatgttcacccacatcataatgtt

SEQ ID NO: 32968 - DNA, 260 bp, Unknown
  Description of Unknown: RightRegion for integrase B6969 sequence
gttcgtacaaaatgcaaatggtgcccccgggcggattcgaaccgtcgacacccgctttaggagatatgatttaatgctaccccctaccattcatcaagcatcattgaatatcatataaccgcagataaacatagcagtttgtgtcttttgcctccggtagctgcgcctacgcttttacaaacatattactaacagctttagctaaactgcactcaatgaattgttgaaaactattcaaagaaacggagcgcaaagatgtc

SEQ ID NO: 32969 - DNA, 260 bp, Unknown
  Description of Unknown: RightRegion for integrase B6970 sequence
accttgtttttcgtaaaacactgtttcgggtttgttatgaacatagaggaggtaggctgattatgcctacctcctcttgttgtgtgaagttattgttcttgttcttggcgaagtagttaaagtagttgttcttgggtttttgcgtgtaacttttgcttagtatgcgcatatatagagaaagtttacgcaaaaaccgattttgaactacttttactacttctgctcggcctgtttcagctccaagacagcggactcaatga

SEQ ID NO: 32970 - DNA, 260 bp, Unknown
  Description of Unknown: RightRegion for integrase B6971 sequence
gtggtctacctgtccgatgatcacctgcggattgctttcaattattcagggggggtctaacgccgaggccgacttcgaccttgtcatggacgcggaggcggcggctggcgaactgtccaaaaagttcgcacaaggtcacgttgcctccaccaacataaaagccacctgaaaacttacgtttttcaggtggcttttgctatatctgctattctgttacgccagatccggcaggatatccgaccacagagcctgctcctgcc

SEQ ID NO: 32971 - DNA, 109 bp, Unknown
  Description of Unknown: RightRegion for integrase B6972 sequence
gtgaaaaagattgtgttggataaggaaaagggagaatttaaggttgtttactacgcatagaaaagccccggaaaccgcataaataaaggctttccggggttattatgag

SEQ ID NO: 32972 - DNA, 260 bp, Unknown; identical to SEQ ID NO: 31098
  Description of Unknown: RightRegion for integrase B6973 sequence

SEQ ID NO: 32973 - DNA, 109 bp, Unknown
  Description of Unknown: RightRegion for integrase B6974 sequence
ctcgcaaaaatcatatatcacaagcctgcgcaatcccttgagctttatttctatgcgtaaggagtttcccgcttcacatccgcgcgcttgaaaatcatatttaaatgca

SEQ ID NO: 32974 - DNA, 260 bp, Unknown
  Description of Unknown: RightRegion for integrase B6975 sequence
cgctgcacgttcgacaaatcccagatgctcctcgcgatctcttataaattcattttctgatgctctctattgtagcaagatggagtatggcccaccatactccatcttgctataatatttgaaatcactttctcagcacaattccatgataatacccggccatcttcgcctccgggcctccggcgtccttatccatgaggaaagctttggcgagatctgcgtaaaattctggccggtctaggccgtacttggcagctacg

SEQ ID NO: 32975 - DNA, 109 bp, Unknown
  Description of Unknown: RightRegion for integrase B6976 sequence
aagatagttttcaataaaaaagaggaaaaattcactctttactattttatcaattactagaacccctttatttatcggggtttgagctgttacacgttcttgcagtatg

SEQ ID NO: 32976 - DNA, 109 bp, Unknown
  Description of Unknown: RightRegion for integrase B6977 sequence
gccttgataagcaaggttagagttactagtgaatccatcgttattttgtggaagttatagggagttttagttacattcatttcaatcagtgtaaaagctcgtagtttaa

SEQ ID NO: 32977 - DNA, 168 bp, Unknown
  Description of Unknown: RightRegion for integrase B6978 sequence
gccttgataagcaaggttcgagtgactagtgaaaccatcgttattttatggaaattatagagcgttttagttacatttatttcaatcagcgtaaaagcacgtaatttaacggccttcaattttttcaacatcattttcatgacatcattccttccatattttgataca

SEQ ID NO: 32978 - DNA, 109 bp, Unknown
  Description of Unknown: RightRegion for integrase B6979 sequence
gccttgataagcaaggttagagtgactagtgaaaccatcgttattttatggaaattatagagcgttttagtaacattcatttcaatcaacgtaaaagcacgtaatttaa

SEQ ID NO: 32979 - DNA, 260 bp, Unknown
  Description of Unknown: RightRegion for integrase B6980 sequence
gttttttttatgatcttgtttctactaactatgcaccgcctgtcggtactgcgtagttagtagaaacgatttttttgtgcagttttgcttttctctggctccgatcggggcgcgatctggactttgcaaaaggcaaattgcacaaaaaagagggccgaacagggaactactccctgcccggtcctcttttactttctcatcttatttcttcagataactctttgaactgaatccgatgtactcaacaccgtcgatagtga

SEQ ID NO: 32980 - DNA, 109 bp, Unknown
  Description of Unknown: RightRegion for integrase B6981 sequence
gccttgataagcaaggttcgtgtcactagtgaaaccatcgttattttatggaaattatagagcgttttactaacctttatttcaatcagcgtaaaagcacgtaatttaa

SEQ ID NO: 32981 - DNA, 260 bp, Unknown
  Description of Unknown: RightRegion for integrase B6982 sequence
gccttgataagcaaggccagagttactagtgaaaccatcgttattttatggaaattatagagcgttttagttacattcatttcaattagcgtaaaagctcgtagttttacggcattcaatttttttaacatcattttcatgacatcattccttccatattttgatacattggtaatagcatggctgcatagatcattacaatcacgacagcaacaataacaaaaatgaggggttgcacaaaggttgttgccttattaaga

SEQ ID NO: 32982 - DNA, 260 bp, Unknown
  Description of Unknown: RightRegion for integrase B6983 sequence
aagatagttttcaataaaaaagaggaaaaattcactctttactattttatcaattactagaacccctttatttatcggggtttgagccgttacacgttcttgcagtatgggggtcctgacggagaatcagcggccgcaatgcgttatatgtcacagaaatttgcaatgaaaaaccctaaagttgcaggtttaatcaacgatattgcggtggaagaacttgggcatctcgaaatggtcggctccattgtttcccagcttgt

SEQ ID NO: 32983 - DNA, 73 bp, Unknown
  Description of Unknown: RightRegion for integrase B6984 sequence
gttcgcacattttcgggttggtgcccccagcgggattcgaacccgcgatatccaccttgaaagggtggcgtcc

SEQ ID NO: 32984 - DNA, 260 bp, Unknown
  Description of Unknown: RightRegion for integrase B6985 sequence
gctctggtgaataagatagtgataaccgaggggggattcgaagttgattggaaattttgagcaagtttatacgaattgtgggtatggatgaatccctgcccacaagttgcataaaaaataagcccccggccaggaggaatcctgaaccgggggctttcgtcatacattattcagttttcgccgcgcccagcgcttgcagcttcttcacaagatcggatacatagttcgcgccgcgactggcaaaaacgcccgtgagcgca

SEQ ID NO: 32985 - DNA, 260 bp, Unknown
  Description of Unknown: RightRegion for integrase B6986 sequence
tttgatacaatgtgtatcagggttgcggtgctttttcttgctcttttcagaataatctgatagtataaagtaaatctggtattcaggagacggatatgaaaaatcaacgcattttattgccctatttatacgcccttatcaccattgtctgtaccttcctggtaggtcagcttatcctgtggtttgtaccggacaacacgaatatctgggcttccgtgctgttcattttcatgaatctgctgccgatgctggttgccttt

SEQ ID NO: 32986 - DNA, 109 bp, Unknown
  Description of Unknown: RightRegion for integrase B6987 sequence
gcactaattaccaaggtgaaagtgacagcagaaagtatcatcatcaaatggaaaatataaagaattttactatctttcatttctataagcgtaaaagcccgtacactga

SEQ ID NO: 32987 - DNA, 260 bp, Unknown
  Description of Unknown: RightRegion for integrase B6988 sequence
aagatagttttcaataaaaaagaggaaaaattcactctttactattttatcaattactagaacccctttatttatcggggtttgagccgttatacgttcttgcagtatgggggtcctgacggagaagcaggggccgcaatgcgttatatgtcacagaaatttgcaatgaaaaaccctaaagttgcaggtttaatcaacgatattgcggtggaagaacttgggcatctcgaaatggtcggctccattgtttcccagcttgt

SEQ ID NO: 32988 - DNA, 109 bp, Unknown
  Description of Unknown: RightRegion for integrase B6989 sequence
gccttgataagcaaggttaaagttactagtaaatccatcgttattttatggaaattatagagcgttttgctatccttcatttcaatcagcgtaaaagcacgtaatttaa

SEQ ID NO: 32989 - DNA, 260 bp, Unknown
  Description of Unknown: RightRegion for integrase B6990 sequence
agtttaattaatagaattgaggtaacaccggatgaaactcgtatttactggcgtttttaacgctaaaaatttttaaatcaaaaaacccaaaaaggtgtagtagtcgcgttgacgataacaacatatttttgggacacctggagactaataagtctccttttttttatatttacggtttataaattggccgaggcgttaggagtaaaggtcgaggatcttctcgagaaataaaaaaaaggaccgaggataaactcctcggt

SEQ ID NO: 32990 - DNA, 260 bp, Unknown
  Description of Unknown: RightRegion for integrase B6991 sequence
gccttgataagcaaggttagggttactagtgaatccatcattattttgtggaaattatagagcgttttagtaacattcatttcaatcagcgtaaaagcacgtaatttaacggcattcaattttttcaacatcattttcatgacatcattccttccatattttgatacattggtaatagcatagctgcatagatcattacaatcacgacagcaacaataacaaaaatgaggggttgcacaaaggttgttgccttattaaga

SEQ ID NO: 32991 - DNA, 109 bp, Unknown
  Description of Unknown: RightRegion for integrase B6992 sequence
gccttaataagcaaggttagagtgactagtgaaaccatcgttattttatggaaattatagagagttttagttacattcatttcaatcagcgtaaaagcacgtaatttaa

SEQ ID NO: 32992 - DNA, 109 bp, Unknown
  Description of Unknown: RightRegion for integrase B6993 sequence
aagatagttttcaataaaaaagaggaaaaattcactctttactattttatcaattactagaacccctttatttatcggggtttgagccgttatacgttcttgcagtatg

SEQ ID NO: 32993 - DNA, 260 bp, Unknown
  Description of Unknown: RightRegion for integrase B6994 sequence
gccttgataagcaaggttagagttactagtgaatccatcgttattttatggaaattatagagcgttttactaacctttatttcaatgaatgacactaaaattcttgatttgagcataaaaaaagacttggcagctcacgctaccaagcgacaatagaaaaaaacaaaaacattctgcacgtaatcgtccaaaagtacatctatagtgtacctctatttagattaaatgtctaacgttatatacaaaataaaaaccccgac

SEQ ID NO: 32994 - DNA, 260 bp, Unknown
  Description of Unknown: RightRegion for integrase B6995 sequence
tccttgataaacaaggttagagttactagtgaaaccatcattattttatggaaattatagagagttttagtgaccttcatttcaatcaaggacactaaaattctttattcgagcaaaaaaaacttggcagcatcggctaccaagcgacatgaaaaaaacaaaaacattgaacgtaaaagtacatctatagtgtacctctatttattttgattgtctaatgctttgtatgcaatacacaaaaaaagactagggttctccta

SEQ ID NO: 32995 - DNA, 260 bp, Unknown
  Description of Unknown: RightRegion for integrase B6996 sequence
gccttgataagcaaggttagggttactagtgaatccatcgttattttgtggaaattatagagagttttggttaccttcatttcaatcaaagtaaaagctcgtagtttaacggcattcaatttttttaacatcattttcatgacatcattccttccatattttgatacattggtaatagcatagctgcatagatcattacaatcacgacagcaacaataacaaaaatgaggggttgcacaaaggttgttgccttattaaga

SEQ ID NO: 32996 - DNA, 260 bp, Unknown
  Description of Unknown: RightRegion for integrase B6997 sequence
gccttgataagcaaggttcgagttactagtgaaagtatcgttattttatggaaattatagagcgttttgctatccttcatttcaatcagcgtaaaagcacgtaatttaacggcattcaattttttcaacatcattttcatgacatcattccttccatattttgatacattggtaatagcatagctgcataaatcattacaatcacgacagcaacaataacaaaaatgaggggttgcacaaaggttgttgccttattaaga

SEQ ID NO: 32997 - DNA, 109 bp, Unknown
  Description of Unknown: RightRegion for integrase B6998 sequence
gccttgataagcaaggttagagttactagtgaatccatcgttattttatggaaattatagagcgttttactaacctttatttcaattagcgtaaaagctcgtagtttaa

SEQ ID NO: 32998 - DNA, 109 bp, Unknown
  Description of Unknown: RightRegion for integrase B6999 sequence
gccttgataagcaaggttcgagttactagtgaaagtatcgttattttatggaaattatagagcgttttgctatccttcatttcaatcaacgtaaaagcacgtaatttaa

SEQ ID NO: 32999 - DNA, 260 bp, Unknown
  Description of Unknown: RightRegion for integrase B7000 sequence
aagatagttttcaataaaaaagaggaaaaattcactctttactattttatcaattactagaacccctttatttatcggggtttgagccgttatacgttcttgcagtatgggggtcctgacggagaagcaggggccgcaatgcgttatatgtcacagaaatttgcaatgaaaaaccctaaagttgcaggtttaatcaacgatattgcggtggaagaactcgtagtttaactatatcattagcataaaggggactattttag

SEQ ID NO: 33000 - DNA, 260 bp, Unknown
  Description of Unknown: RightRegion for integrase B7001 sequence
gtggatcacatcacatattttaaagaatttcaagctgtagatattgtgtatagaacatgatcgcttttagcattaaggtcctccatatttcaaaagtagatagtagccaatcttttacaggttggctacttttttattggcggcatggtgctaaactctgcggaaatctatatcatgtataattttataggaggtgatgagatgccgagagcaaatgcgattgattggtcacaaattaaagcacggtatgtggccggtga

SEQ ID NO: 33001 - DNA, 260 bp, Unknown
  Description of Unknown: RightRegion for integrase B7002 sequence
gctctggtgaataagatagtgataaccgatggtggattcgaagttgattggaaattttgaacaaatttatatgaattgtgagtatggatgaatccctgcccatgcggctattttgggcaccccacccgcgcgtgcagctgcacgccctatgccattgagcgctatctgcagcgcgtttccggtccgctgctggacgctatcggtcacgcactgacattcgtaaaattttcggtgttttctccccctttatttctgtgttt

SEQ ID NO: 33002 - DNA, 109 bp, Unknown
  Description of Unknown: RightRegion for integrase B7003 sequence
aaaatattagtttatccagataagctagaaattcactggaagtttgcgattaatcagtaaatttaatatatttcatttcaaccaatgtaaagccttttttgacacgcca

SEQ ID NO: 33003 - DNA, 109 bp, Unknown; identical to SEQ ID NO: 32998
  Description of Unknown: RightRegion for integrase B7004 sequence

SEQ ID NO: 33004 - DNA, 260 bp, Unknown
  Description of Unknown: RightRegion for integrase B7005 sequence
gcattgataagcaaggttagagtgactagtgaaaccatcgttattttatggaaattatagagcgttttagttacattcatttcaatcaaggacactaaaattcttgatttgagcataaaaaagacttggcaacgaaggctaccaagtgatacggaaaagcaactattagactttgctaaagggcaagtctgagtacatctatagtgtacctctatttgaattaaatgtctaacgttatatcaatgatacacaaaaaaagg

SEQ ID NO: 33005 - DNA, 260 bp, Unknown
  Description of Unknown: RightRegion for integrase B7006 sequence
aacttgttcctaatcagggatgggttcggatttgtcttttatctggaagataccatttgacgcaaaaggtcatcccgccgagggatgaccttttgctttcggatattgaaaatatttgaaaaccagagtaaaatacaattacatatctgtactgccctatatacaatcattgtgtcggaggtaaagagagaatatgcagaagaaaagaatcttgtccgcagtcatcgcggcagcattgagcgcgactatgacagtacccg

SEQ ID NO: 33006 - DNA, 260 bp, Unknown
  Description of Unknown: RightRegion for integrase B7007 sequence
gctctggtgaataagatagtgataaccgaggggggattcgaagttgattggaaattttgagcaagtttatacgaattgtgggtatggatgaatccctgcccatgcggctattttgggcaccccacccgcgcgtgcagctgcacgccctatgccattgagcgctatctgcagcgcgtttccggtccgctgctggacgctatcggtcacgcgctgacattcgtaaaattttcagtgttttcgccccctttattcctgtgttt

SEQ ID NO: 33007 - DNA, 109 bp, Unknown; identical to SEQ ID NO: 32992
  Description of Unknown: RightRegion for integrase B7008 sequence

SEQ ID NO: 33008 - DNA, 181 bp, Unknown
  Description of Unknown: RightRegion for integrase B7009 sequence
gcattgataagcaaggttcgagtgactagtgaaaccatcgttattttatggaaattatagagagttttagttacattcatttcaatcagcgtaaaagcacgtaatttaacggcattcaattttttcaacatcattttcatgacatcattccttccatattttgatacattggtaatagcat

SEQ ID NO: 33009 - DNA, 109 bp, Unknown
  Description of Unknown: RightRegion for integrase B7010 sequence
ataaaaaatatcgttgtatatcctgaaagaatggaagttcactgggtatttgaaaaataaacagatttactatctatgatttcgataatcgtaaaggctgaatgttgct

SEQ ID NO: 33010 - DNA, 260 bp, Unknown
  Description of Unknown: RightRegion for integrase B7011 sequence
tccttaattaacaaggttcaagttacagttgataagattgtcatcaaatggaaaatataagagttttactatccttgatttcaatgctggtttctaaaattgttgattgttcccaaagaaaaaactcttgcattatgcaagagtagacacaaactttaaacaatctatcaaatgagccttcgctctacttcgattatacgcaatttattgaccgatagcctaccacggtctgagccacaaggagcgaccctgtaacttcc

SEQ ID NO: 33011 - DNA, 109 bp, Unknown
  Description of Unknown: RightRegion for integrase B7012 sequence
gccttgataagcaaggttcgagttactagtgaaaccatcgttattttatggaaattatagggagttttagttacatttatttcaatcagcgtaaaagcacgtaatttta

SEQ ID NO: 33012 - DNA, 181 bp, Unknown
  Description of Unknown: RightRegion for integrase B7013 sequence
gccttgataagcaaggttcgagtgactagtgaaactatcgttattttatggaaattatagagcgttttgctatccttcatttcaatcaacgtaaaagcacgtaatttaacggcattcaattttttcaacatcattttcatgacatcattccttccatattttgatacattggtaatagcat

SEQ ID NO: 33013 - DNA, 260 bp, Unknown
  Description of Unknown: RightRegion for integrase B7014 sequence
aagatagttttcaataaaaaagaggaaaaattcactctttactattttatcaattactagaaatcctttatttatcagggtttgagctgttacacgttcttgcagtatgggggtcctgacggagaagcaggggccgcaatgcgttatatgtcacagaaatttgcaatgaaaaaccctaaagttgcaggtttaatcaacgatattgcggtggaagaactcgtagtttaactatatcattagcataaaggggactattttag

SEQ ID NO: 33014 - DNA, 260 bp, Unknown
  Description of Unknown: RightRegion for integrase B7015 sequence
gccttaataagcaaggttagagtgactagtgaaaccatcgttattttatggaaattatagagagttttagttacattcatttcaatcagcgtaaaagcacgtaatttaacggcattcaattttttcaacatcattttcatgacatcattccttccatattttgatacattggtaatagcatagctgcatagatcattacaatcacgacagcaacaataacaaaaatgaggggttgcacaaaggttgttgccttattaaga

SEQ ID NO: 33015 - DNA, 109 bp, Unknown
  Description of Unknown: RightRegion for integrase B7016 sequence
gcattgataagtaaagttagggttactagtgaatccatcgttattttatggaaattatagagagttttagttacatccatttcaatcagagtaaaagcacgtaacttaa

SEQ ID NO: 33016 - DNA, 109 bp, Unknown
  Description of Unknown: RightRegion for integrase B7017 sequence
gccttgataagtaaggttagggttactagtgaatccatcgttattttatggaaattatagagagttttagttacatccatttcaatcagagtaaaagcacgtaacttaa

SEQ ID NO: 33017 - DNA, 260 bp, Unknown
  Description of Unknown: RightRegion for integrase B7018 sequence
aacaccttatttttcgtaaagcattgcttcggatttgttttgatagtagaggaagtctgatttcggtcaggcttccttcttttctgtggcgagtttcagctcaaggacagcggcttcgataatattgtcgatctcggcggtgtcgagatggaaacccttgctgttcagaaattcaaccacataggctttcttttcctcaccacggcctgtgccgacatagatcatttctgccgcttccacggcgatgttcacccaaaact

SEQ ID NO: 33018 - DNA, 109 bp, Unknown
  Description of Unknown: RightRegion for integrase B7019 sequence
aaaatattagtttatccagataagctagaaattcactggaagtttgcgaataatcagtaaatttaatatacttcatttcaaccaatgtaaagccttttttgacacgcca

SEQ ID NO: 33019 - DNA, 87 bp, Unknown
  Description of Unknown: RightRegion for integrase B7020 sequence
gccttgataagcaaggttagggttactagtgaatccatcgttattttgtggaaattatagggaattttactatccttcatttcaatc

SEQ ID NO: 33020 - DNA, 144 bp, Unknown
  Description of Unknown: RightRegion for integrase B7021 sequence
gccttgataagcaaggttagagttactagtgaatccatcgttattttatggaaattatagagcgttttgctatccttcatttcaatcaacgtaaaagcacgtaatttaacggcattcaattttttcaacatcattttcatgaca

SEQ ID NO: 33021 - DNA, 260 bp, Unknown
  Description of Unknown: RightRegion for integrase B7022 sequence
gccttgataagcaaggttagggttactagtgaatccatcgttattttgtggaaattatagagcgttttagtaaccttcatttcaatcagcgtaaaagcacgtaatttaacggcattcaattttttcaacatcattttcatgacatcattccttccatattttgatacattggtaatagcatagctgcatagatcattacaatcacgacagcaacaataacaaaaatgaggggttgcacaaaggttgttgccttattaaga

SEQ ID NO: 33022 - DNA, 260 bp, Unknown
  Description of Unknown: RightRegion for integrase B7023 sequence
aaaatcgaagtcagccccagcaagatgaaaattcattggcgttttaatgtcgaaaaataattttaggttccttgatttcaatcaagctctctaaaattatttatgggtaataaaaaagccttcctagcaaatctgataggaaggctttagagttagatgtagaaagttttggatcaactagatccatataattctagatccatataattcgcaagactattatacaatatttgcttgaattgtcaacactaaatttgtag

SEQ ID NO: 33023 - DNA, 260 bp, Unknown
  Description of Unknown: RightRegion for integrase B7024 sequence
gtagattgcatagtctttaaccgctcaacttcttcggttgatatatttctttatatctgattatcacttttcggagtacggtggacctgacggagaactcggtgcatcactcagatatttaagtcagagatttacaatgccgctgccggaattaaaagccaccttaaccgacatcggtaccgaggaattaaatcaccttgaaatgataggtgcaattgtatatcagcttacaaaagacctcacggaagatgaaatcaaaa

SEQ ID NO: 33024 - DNA, 260 bp, Unknown
  Description of Unknown: RightRegion for integrase B7025 sequence
tcttttatcgatgttataactattgatggaaattataacattgacattaaatttttataattttttttacacatttacttgtactaagttactatcaccacctggttaatgttatttagtacaagcactaaaatagaaagaagtacagtaaaaattatttgtacttctttctgtatactattataatattattagatagttttttcggttctgttggccttattactatctggagcatttactgttgcagcagtagatgc

SEQ ID NO: 33025 - DNA, 260 bp, Unknown
  Description of Unknown: RightRegion for integrase B7026 sequence
gtagattgcatagtctttaaccgctcaacttcttcggttgatatatttctttatatctgattatcacttttcggagtacggtggacctgacggagaactcggcgcatcactcagatatttaagtcagagatttacaatgccgctgccggaattaaaagccaccttaaccgacatcggtaccgaggaattaaatcaccttgaaatgataggtgcaattgtatatcagcttacaaaaggcctcacggaagatgaaatcaaaa

SEQ ID NO: 33026 - DNA, 260 bp, Unknown
  Description of Unknown: RightRegion for integrase B7027 sequence
atcgataaaataatcttcaatcgttccctgtcttccgttgagttatttttctgtttttgaattataacttttgggatatgggggacctgatggtgagctcggtgcatcacttagatatttaagtcagaggtacacaatgccgttccctgaacttcaagcaacacttaccgacataggtacagaagaacttggtcaccttgaaatgataggtactattgtttatcagctaactaaagacttaacagaagaccaattaaaag

SEQ ID NO: 33027 - DNA, 260 bp, Unknown
  Description of Unknown: RightRegion for integrase B7028 sequence
gttcgaggaaaattggaatggtgcccccgggcggattcgaaccgtcgacacccgctttaggaggtcatgagctcttaccctacctgcggtttttcattttcatcaatatctctatttccgcaggtaatttagctattctgccgtttttgctcttcttgattagttttcaatttcaccctatttacaccccttcaccccttcattttgacttgcaggggtgaaatttttgggttagcctcgggggcgaggccctcaaagcc

SEQ ID NO: 33028 - DNA, 260 bp, Unknown
  Description of Unknown: RightRegion for integrase B7029 sequence
gtagattgcatagtctttaaccgctcaacttcttcggttgatatatttctttatatctgattatcacttttcggagtacggtggacctgacggagaactcggcgcatcactcagatatttaagtcagagatttacaatgccgctgccggaattaaaagccaccttaaccgacatcggtaccgaggaattaaatcaccttgaaatgataggtgcaattgtatatcagcttacaaaagacctcacggaagatgaaatcaaaa

SEQ ID NO: 33029 - DNA, 260 bp, Unknown
  Description of Unknown: RightRegion for integrase B7030 sequence
aacatacaaagtacattaacttcggtcgtgggaactattggttgcgggagctggatttgaaccaacgaccttcgggttatgagaactgacaagcggtgaacggcatgagtgaagcccctcgcaaaagtaactataagccccgtggagaagtgataagcaacgagggaaaactactcacggaagcaggcacaagccctcacatggagcgacaagcgacacaaggcaagctccacaagagcaaaaagaaaaaacacggaaaa

SEQ ID NO: 33030 - DNA, 260 bp, Unknown
  Description of Unknown: RightRegion for integrase B7031 sequence
aatatccgagaaaagggcccgcactcacgtgttcgagtacggcccgaatggtggacttgataagtccaaatccgaaatagtagcggtattgttttcgccgctgtaattgtaggttatgacaatcttatcatcatagacgaaaacggcgtgaacaaaggtatcaataagctgctggcggtatttttcgcttgttatgtcgccgtccttaaagctggaaatccaataaattatttgttccctgctgatgatccgccgcgcaa

SEQ ID NO: 33031 - DNA, 260 bp, Unknown
  Description of Unknown: RightRegion for integrase B7032 sequence
gtagattgcgtagtctttaaccgctcaacttcttcggttgatatatttctttatatctgattatcacttttcggagtacggtggacctgacggagaactcggcgcatcactcagatatttaagtcagagatttacaatgccgctgccggaattaaaagccaccttaaccgacatcggtaccgaggaattaaatcaccttgaaatgataggtgcaattgtatatcagcttacaaaagacctcacggaagatgaaatcaaaa

SEQ ID NO: 33032 - DNA, 109 bp, Unknown
  Description of Unknown: RightRegion for integrase B7033 sequence
aaaatcgaagtcagccccagcaagatgaaaattcattggcgttttaatgtcgaaaaataattttaggttccttgatttccaatagcgtaaacgcgtgccgtttctgctt

SEQ ID NO: 33033 - DNA, 260 bp, Unknown
  Description of Unknown: RightRegion for integrase B7034 sequence
ccgctggagcaggtaaccgctgctctgcgggagagttcgtgcagtgttgcgtgtgcctaagggctctcattttgatacaaattaaacctgaaaatcccgcaattctgcgaggttttttgtttttcggctgaaaatcaagagaaatgctatcactcatggatgtgaaaatcgaaagccaaatcgcaaacgataagcaaaggtatcgtttggtttttagggactgttttcagacattgtttgtacataagttgagctatcgt

SEQ ID NO: 33034 - DNA, 260 bp, Unknown
  Description of Unknown: RightRegion for integrase B7035 sequence
gccttgataagcaaggttagggttactagtgaatccatcgttattttgtggaaattatagagtgttttagtatcctttatttcaatcagtgtaaaagctcgtagtttaacggcattcaatttttttaacatcattttcatgacatcattccttccatattttgatacattggtaatagcatggctgcatagatcattacaatcacgacagcaacaataataaaaatgaggggttgcacaaaggttgttgccttattaaga

SEQ ID NO: 33035 - DNA, 260 bp, Unknown
  Description of Unknown: RightRegion for integrase B7036 sequence
attgataaaatcatcttcaatcgttccctatcttccgttgagttatttttctgtttttgaattataacttttgggatatgggggacctgatggtgagctcggtgcatcacttagatatttaagtcagaggtacacaatgccgttccctgaacttcaagcaacacttaccgacataggtacagaagaacttggtcaccttgaaatgataggcactattgtttatcagctaactaaagacttaacagaagaccaattaaaag

SEQ ID NO: 33036 - DNA, 260 bp, Unknown
  Description of Unknown: RightRegion for integrase B7037 sequence
gtggagcgcatcgtcttcaaaaagcccgaaaacgaattcgatattttcttttatgtttaaaagtatatctatttaccgtccgcaccgccgtattgttccataattatttgcgcatacttgggatttgggtttttaatattaacagggtattgcagttttttctcatagctccacataattttcagccctccgcaccaaagtcgttgtcccacggccaggggccgtctgtccatttccagctgccctctgccggagcatcg

SEQ ID NO: 33037 - DNA, 109 bp, Unknown
  Description of Unknown: RightRegion for integrase B7038 sequence
atcgataaaatcatcttcaatcgttccctatcttccgttgagttatttttctgtttttgaattataacttttgggatatgggggacctgatggtgagctcggtgcatca

SEQ ID NO: 33038 - DNA, 109 bp, Unknown; identical to SEQ ID NO: 33037
  Description of Unknown: RightRegion for integrase B7039 sequence

SEQ ID NO: 33039 - DNA, 109 bp, Unknown
  Description of Unknown: RightRegion for integrase B7040 sequence
atcgataaaatcatcttcaatcgctccctgtcttccgttgaattatttttctgtttttgaattataacttttgggatatgggggacctgatggtgagctcggtgcatca

SEQ ID NO: 33040 - DNA, 260 bp, Unknown
  Description of Unknown: RightRegion for integrase B7041 sequence
aacatacaaagtacattaacttcggtcgtgggaactattggttgcgggagctggatttgaaccaacgaccttcgggttatgagaactagcaggcaacaaacagcatgagtgaagcccctcgcaaaagtaactataagccccgtggagaagtgataagcaacgagggaaaactactcacggaagcaggcacaagccctcacatggagcgacaagcgacacaaggcaagctccacaagagcaaaaagaaaaaacacggaaaa

SEQ ID NO: 33041 - DNA, 260 bp, Unknown
  Description of Unknown: RightRegion for integrase B7042 sequence
ttcgaatcaatttctttcgatcgtaaatctggtgaattgctctttgatgcaaaatcataggttaatgctatatggtggaccggatggcgaaatcggagcttccatgcgctatctgtcacagcgtttcaccgcgccaaaccgtacctgtatgggaatattgaacgatatcggtacagaagcccctgaaatgttccgttcaggggctaacgctttttttgacgcttttgcaaccgtatagctccatttcataggaagcaaat

SEQ ID NO: 33042 - DNA, 109 bp, Unknown
  Description of Unknown: RightRegion for integrase B7043 sequence
atcgataaaatcatcttcaatcgttccctatcttccgttgagttatttttctgtttttgaattataatttttgggatatgggggacctgatggtgagctcggtgcatca

SEQ ID NO: 33043 - DNA, 260 bp, Unknown
  Description of Unknown: RightRegion for integrase B7044 sequence
atcgataaaatcatcttcaatcgttccctatcttccgttgagttatttttctgtttttgaattataacttttgggatatgggggacctgatggtgaacttggtgcatcacttagatatttaagtcagaggtacacaatgccgtttcctgaacttcaagcaacacttaccgacataggtacagaagaacttggtcaccttgaaatgataggcactattgtttatcagctaactaaagacttaacagaagaacaattaaaag

SEQ ID NO: 33044 - DNA, 109 bp, Unknown; identical to SEQ ID NO: 33037
  Description of Unknown: RightRegion for integrase B7045 sequence

SEQ ID NO: 33045 - DNA, 107 bp, Unknown
  Description of Unknown: RightRegion for integrase B7046 sequence
aacatacaaagcacattaaaatcagtcttaagaaatattggttgcggaggcaggatttgaacctacgaccttcgggttatgagcccgacgagctaccgaactgctcc

SEQ ID NO: 33046 - DNA, 109 bp, Unknown
  Description of Unknown: RightRegion for integrase B7047 sequence
aaaatcgaggtcagccccagcaagatgaaaattcattggcgttttaatgtcgaaaaataattttaggtttcttgatttccaatagcgtaaacgcgtgccgtttctgctt

SEQ ID NO: 33047 - DNA, 181 bp, Unknown
  Description of Unknown: RightRegion for integrase B7048 sequence
gccttgataagcaaggttcgtgtcactagtgaaaccatcgttattttatggaaattatagagcgttttactaacctttatttcaatcagcgtaaaagcacgtaatttaacggcattcaattttttcaacatcattttcatgacatcattccttccatattttgatacattggtaatagcat

SEQ ID NO: 33048 - DNA, 260 bp, Unknown
  Description of Unknown: RightRegion for integrase B7049 sequence
aatctgatagataaggtatttgttaaacctggcatcattgatataaattggagaatttaggtcagaaaaataacaaatttagatactcttgtttctaccaaagtgaaagctttaaccttggctttttttaaatttgtcatgagttttttcattttaaaaatttacctccatattttgatacatgggcataagcattgccgcataaagtaaaacgataatcagagccacaaagataaaaaccagtggctgtactaagttca

SEQ ID NO: 33049 - DNA, 108 bp, Unknown
  Description of Unknown: RightRegion for integrase B7050 sequence
gaccaggtgctggagtatttcgtcgataagatttacctgaccgacgacgggctggggtagtgcccgaaaagttgcgcactttggatcatggccgtccatggagcgatg

SEQ ID NO: 33050 - DNA, 69 bp, Unknown
  Description of Unknown: RightRegion for integrase B7051 sequence
gttcgtacaaaatgcaaatggtgcccccagcgggattcgaacccgcgatatccaccttgaaagggtggc

SEQ ID NO: 33051 - DNA, 260 bp, Unknown
  Description of Unknown: RightRegion for integrase B7052 sequence
gtagattgcatagtctttaaccgctcaacttcttcggttgatatatttctttatatctgattatcacttttcggagtacggtggacctgacggagaactcggcgcatcactcagatatttaagtcagagatttacaatgccgctgccggaattaaaagccaccttaaccgacatcggtaccgaggaattaaatcaccttgaaatgataggggcaattgtatatcagcttacaaaagacctcacggaagatgaaatcaaaa

SEQ ID NO: 33052 - DNA, 260 bp, Unknown
  Description of Unknown: RightRegion for integrase B7053 sequence
gtagattgcatagtctttaaccgctcaacttcttcggttgatatatttctttatatctgattatcacttttcggagtacggtggacctgacggagaactcggcgcatcactcagatatttaagtcagagatttacaatgccgctgccggaattaaaagccaccttaaccgacatcggtaccgaagaattaaatcatcttgaaatgataggtgcaattgtatatcagcttacaaaagacctcacggaagatgaaatcaaaa

SEQ ID NO: 33053 - DNA, 260 bp, Unknown
  Description of Unknown: RightRegion for integrase B7054 sequence
gtagattgcatagtctttaaccgctcaacttcttcggttgagatatttctttatatctgattatcacttttcggagtacggtggacctgacggagaactcggcgcatcactcagatatttaagtcagagatttacaatgccgctgccggaattaaaagccaccttaaccgacatcggtaccgaggaattaaatcaccttgaaatgataggtgcaattgtatatcagcttacaaaagacctcacggaagatgaaatcaaaa

SEQ ID NO: 33054 - DNA, 260 bp, Unknown
  Description of Unknown: RightRegion for integrase B7055 sequence
ccgctggagcaggtaaccgctgctctgcgggagagttcgtgcagtattgcgtgtgcctaagggctctcattttgatacaaaataatcccaaaaatcccgcaattctgcgaggttttttgtttttcggctgaaaatcaagagaaatgctatcactcatggatgtgaaaatcgaaagccaaatcgcaaacgataggaaaaggtatcgtttgatttctgaaggctgttttcagacattgtttgtacatatatagaactatcgt

SEQ ID NO: 33055 - DNA, 260 bp, Unknown
  Description of Unknown: RightRegion for integrase B7056 sequence
atcatagaggagatctatatagacgggactgaggtaaccgggattaagccccggatttaatcttacccgtatggtggactaagttgcacactctgtactcactcccgcgccgccgaaaaagacgatgcggttactctcctgcacccatgttttcagagtttccagcttgttcacggtcttccgcctccatttctttcagcagcttcttgtcctgcttcgacgataaatccagctgtgcatacatgtccggccgccgcgcc

SEQ ID NO: 33056 - DNA, 260 bp, Unknown; identical to SEQ ID NO: 33025
  Description of Unknown: RightRegion for integrase B7057 sequence

SEQ ID NO: 33057 - DNA, 260 bp, Unknown
  Description of Unknown: RightRegion for integrase B7058 sequence
gtagattgcatagtctttaaccgctcaacttcttcgattgatatatttctttatatctgattatcacttttcggagtacggtggacctgacggagaactcggcgcatcactcagatatttaagtcagagatttacaatgccgctgccggaattaaaagccaccttaaccgacatcggtaccgaagaattaaatcaccttgaaatgataggtgcaattgtatatcagcttacaaaaggcctcacggaagatgaaatcaaaa

SEQ ID NO: 33058 - DNA, 260 bp, Unknown
  Description of Unknown: RightRegion for integrase B7059 sequence
gtagattgcatagtctttaaccgctcaacttcttcggttgatatatttctttatatctgattatcacttttcgtagtacggtggacctgacggagaactcggtgcatcactcagatatttaagtcagagatttacaatgccgctgccggaattaaaagccaccttaaccgacatcggtaccgaggaattaaatcaccttgaaatgataggtgcaattgtatatcagcttacaaaagacctcacggaagatgaaatcaaaa

SEQ ID NO: 33059 - DNA, 109 bp, Unknown
  Description of Unknown: RightRegion for integrase B7060 sequence
aacatacaaagtacattaacttcggtcgtgggaactattggttgcgggagctggatttgaaccaacgaccttcgggttatgagcccgacgagctaccgaactgctccat

SEQ ID NO: 33060 - DNA, 260 bp, Unknown
  Description of Unknown: RightRegion for integrase B7061 sequence
gtagattgcatagtctttaaccgctcaacttcttcggttgatatatttctttatatctgatcatcacttttcggagtacggtggacctgacggagaactcggcgcatcactcagatatttaagtcagagatttacaatgccgctgccggaattaaaagccaccttaaccgacatcggtaccgaggaattaaatcaccttgaaatgataggtgcaattgtatatcagcttacaaaagacctcacggaagatgaaatcaaaa

SEQ ID NO: 33061 - DNA, 260 bp, Unknown
  Description of Unknown: RightRegion for integrase B7062 sequence
atcgataaaatcatcttcaatcgttccctatcttccgttgagttatttttctgtttttgaattataacttttgggatatgggggacctgatggtgagctcggtgcatcacttagatatttaagtcagaggtacacaatgccgttccctgaacttcaagcaacacttaccgacataggtacagaagaacttggtcaccttgaaatgataggtactattgtttatcagctaactaaagacttaacagaagaccaattaaaag

SEQ ID NO: 33062 - DNA, 260 bp, Unknown; identical to SEQ ID NO: 33058
  Description of Unknown: RightRegion for integrase B7063 sequence

SEQ ID NO: 33063 - DNA, 260 bp, Unknown
  Description of Unknown: RightRegion for integrase B7064 sequence
atcatagaggagatctatatagacgggactgaggtaaccgggattaagccccggatttaatcttacccgtatggtggactaagttgcacactccgtactcactcccgcgccgccgaaaaagacgatgcggttactctcctgcacccatgctttcagagtttccagcttgttcacggtcttccgcctccatttccttcagcagctttttgtcctgcttcgacgataaatccagctgttcgtacatatccggccgccgcgcc

SEQ ID NO: 33064 - DNA, 260 bp, Unknown; identical to SEQ ID NO: 33023
  Description of Unknown: RightRegion for integrase B7065 sequence

SEQ ID NO: 33065 - DNA, 260 bp, Unknown
  Description of Unknown: RightRegion for integrase B7066 sequence
atcgataaaatcatcttcaatcgttccctctcttccgttgagttatttttctgtttttgaattataacttttgggatatgggggacctgatggtgagctcggtgcatcacttagatatttaagtcagaggtacacaatgccgttccctgaacttcaagcaacacttaccgacataggtacagaagaacttggtcaccttgaaatgataggcactattgtttatcagctaactaaagacttaacagaagaccaattaaaag

SEQ ID NO: 33066 - DNA, 260 bp, Unknown
  Description of Unknown: RightRegion for integrase B7067 sequence
gccttgataagcaaggttcgagttactagtgaatccatcgttattttatggaaattatagagcgttttactaacctttatttcaatcaaggacactaaaattcttgattgagcataaaaaaagacttggcagcccacgctaccaagtgacatgaaaaacaaaaacattcagcgcgtaatcgcctaaagtacatatatagtgtacctttatttagattaaatgtctaatgcaaaacaaagaatacacaaaaaagcccgact

SEQ ID NO: 33067 - DNA, 260 bp, Unknown
  Description of Unknown: RightRegion for integrase B7068 sequence
atcgataaaatcatcttcaatcgttccctatcttccgttgagttatttttctgtttttgaattataacttttgggatatgggggacctgatggtgagcttggtgcatcacttagatatttaagtcagaggtacacaatgccgttccctgaacttcaagcaacacttaccgacataggtacagaagaacttggtcaccttgaaatgataggcactattgtttatcagctaactaaagacttaacagaagaccaattaaaag

SEQ ID NO: 33068 - DNA, 260 bp, Unknown
  Description of Unknown: RightRegion for integrase B7069 sequence
atcgataaaatcatcttcaatcgttccctatcttccgttgagttatttttctgtttttgaattataatttttgggatatgggggacctgatggtgagcttggtgcatcacttagatatttaagtcagaggtacacaatgccgttccctgaacttcaagcaacacttaccgacataggtacagaagaacttggtcaccttgaaatgataggcactattgtttatcagctaactaaagacttaacagaagaccaattaaaag

SEQ ID NO: 33069 - DNA, 109 bp, Unknown; identical to SEQ ID NO: 33032
  Description of Unknown: RightRegion for integrase B7070 sequence

SEQ ID NO: 33070 - DNA, 109 bp, Unknown
  Description of Unknown: RightRegion for integrase B7071 sequence
gttgaacgcattgtataccaaaaatcacaaaacgcctttgaaatttacttttatgtttaattttttatatctaatttccgtccgcaccaccgtattgagttatgataat

SEQ ID NO: 33071 - DNA, 109 bp, Unknown
  Description of Unknown: RightRegion for integrase B7072 sequence
aaaatcgaagtcagccccagcaagatgaaaattcattggcgttttaatgtcgaaaaataattttaggtttcttgatttccaatagcgtaaacgcgtgccgtttctgctt

SEQ ID NO: 33072 - DNA, 260 bp, Unknown; identical to SEQ ID NO: 33023
  Description of Unknown: RightRegion for integrase B7073 sequence

SEQ ID NO: 33073 - DNA, 260 bp, Unknown; identical to SEQ ID NO: 33036
  Description of Unknown: RightRegion for integrase B7074 sequence

SEQ ID NO: 33074 - DNA, 260 bp, Unknown
  Description of Unknown: RightRegion for integrase B7075 sequence
aacatacaaagtacattaacttcggtcgtgggaactattggttgcgggagctggatttgaaccaacgaccttcgggttatgagaactggcaagcggtgaacggcatgagtgaagcccctcgcaaaagtaactataagccccgtggagaagtgataagcaacgagggaaaactactcacggaagcaggcacaagccctcacatggagcgacaagcgacacaaggcaagctccacaagagcaaaaagaaaaaacatggaaaa

SEQ ID NO: 33075 - DNA, 260 bp, Unknown
  Description of Unknown: RightRegion for integrase B7076 sequence
aatatccgagaaaagggcccgcactcacgtgttcgagtacggcccgaatggtggacctgacgggagtcgaacccgttaaattaaggctcataacgccagtatttacaatgctttgaacttttcgtgacaaatttcatgacaaaattcctcatcatccgatataaacttttccgtccacgccaacagccagacatacaatcgtggcatccagtttgaaccacacggatccatcatcgaactttctgacctctaccggtttg

SEQ ID NO: 33076 - DNA, 260 bp, Unknown
  Description of Unknown: RightRegion for integrase B7077 sequence
gttcgtacaaaatgcaaatggtgcccccgggcggattcgaaccgtcgacacccgctttaggaggtcatgagctattaccctacctgcggtttttcattttcatcaatatctctgtttccgcaggtaatttagctattctgccgtttttgctcttcttgattagttttctatttcaccctttttacacccctttaccccttcattttgacttgcaggggtgaaatttttgggttagcctcgggggcgaggccctcaaagcc

SEQ ID NO: 33077 - DNA, 260 bp, Unknown
  Description of Unknown: RightRegion for integrase B7078 sequence
atcgataaaatcatcttcaatcgctccctatcttccgttgagttatttttctgtttttgaattataacttttgggatatgggggacctgatggtgagctcggtgcatcacttagatatttaagtcagaggtacacaatgccgttccctgaacttcaagcaacacttaccgacataggtacagaagaacttggtcaccttgaaatgataggtactattgtttatcagctaactaaagacttaacagaagaccaattaaaag

SEQ ID NO: 33078 - DNA, 260 bp, Unknown; identical to SEQ ID NO: 33035
  Description of Unknown: RightRegion for integrase B7079 sequence

SEQ ID NO: 33079 - DNA, 260 bp, Unknown; identical to SEQ ID NO: 33061
  Description of Unknown: RightRegion for integrase B7080 sequence

SEQ ID NO: 33080 - DNA, 260 bp, Unknown
  Description of Unknown: RightRegion for integrase B7081 sequence
gtagatcgcatagtctttaaccgctcaacttcttcggttgatatatttctttatatctgattatcacttttcggagtacggtggacctgacggagaactcggcgcatcactcagatatttaagtcagagatttacaatgccgctgccggaattaaaagccaccttaaccgacatcggtaccgaggaattaaatcaccttgaaatgataggtgcaattgtatatcagcttacaaaagacctaacagaagatgaaatcaaaa

SEQ ID NO: 33081 - DNA, 260 bp, Unknown
  Description of Unknown: RightRegion for integrase B7082 sequence
aaaattgaagtcagccccagcaagatgaaaatccattggcgttttaacgtcgaaaaataattttaggtttcttgatttcaatcaagctctctaaaattatttatgggtaataaaaaagccttcctagcaaatctgataggaaggctttagagttagatgtagaaagttttggatcaactagatccatataattcgcaaggctattatacaatatttgcttgaattgtcaacactaaatttgtagtgtttggccaacataa

SEQ ID NO: 33082 - DNA, 109 bp, Unknown
  Description of Unknown: RightRegion for integrase B7083 sequence
attgataaaatcatcttcaatcgttccctatcttccgttgagttatttttctgtttttgaattataacttttgggatatgggggacctgatggtgagctcggtgcatca

SEQ ID NO: 33083 - DNA, 109 bp, Unknown
  Description of Unknown: RightRegion for integrase B7084 sequence
gaacagatcatatatgataaggaatccggaaaaatgtcttttgacatcattatttcctgaattgaaaatcccgcaaacccgcataaacactgggtttgccggtctatta

SEQ ID NO: 33084 - DNA, 260 bp, Unknown
  Description of Unknown: RightRegion for integrase B7085 sequence
gggcttataaacaaggttcaggtgacagctgaggacattgttatcaattggaaaatataaataattttagtaacctacatttcaatcaaggatagtaaaattattgattttttccatctcatacatctgcaacgaatgcaacacgagatcacgatatttccaggttgataccaggtactcaataacctcttggtcctctatcttgcattccatgagtagcaacagcttgaccgtgtacttatttttcaaaaccggcacct

SEQ ID NO: 33085 - DNA, 260 bp, Unknown
  Description of Unknown: RightRegion for integrase B7086 sequence
aacatacaaagtacattaacttcggtcgtgggaactattggttgcgggagctggatttgaaccaacgaccttcgggttatgagaactagcaggcaacaaacagcatgagtgaagcccctcgcaaaagtaactataagccccgtggagaagcgacaagcgacacaaggcaagctccacaagagcaaaaagaaaaaacacggaaaaagaaaacaaaaaacgcaaacaaacagcggacaaaaccacaaagaaaaaagacccga

SEQ ID NO: 33086 - DNA, 180 bp, Unknown
  Description of Unknown: RightRegion for integrase B7087 sequence
gccttgataagcaaggttcgtgtcactagtgaatccatcgttattttgtggaaattatagagcgttttagtaacgttcatttcaatcagtgtaaaagctcgtagtttaacggcattcaatttttttaacatcattttcatgacatcattccttccatattttgatacattggtaatagca

SEQ ID NO: 33087 - DNA, 68 bp, Unknown
  Description of Unknown: RightRegion for integrase B7088 sequence
gttcgtacaaaatgcaaatggtgcccccagcgggattcgaacccgcgatatccaccttgaaagggtgg

SEQ ID NO: 33088 - DNA, 109 bp, Unknown
  Description of Unknown: RightRegion for integrase B7089 sequence
aatatccgagaaaagggcccgcactcacgtgttcgagtacggcccgaatggtggaggtgaggggagtcgaacccctgtccgaagatctgtcaaccagaatttctccgag

SEQ ID NO: 33089 - DNA, 260 bp, Unknown; identical to SEQ ID NO: 33023
  Description of Unknown: RightRegion for integrase B7090 sequence

SEQ ID NO: 33090 - DNA, 109 bp, Unknown; identical to SEQ ID NO: 33032
  Description of Unknown: RightRegion for integrase B7091 sequence

SEQ ID NO: 33091 - DNA, 109 bp, Unknown; identical to SEQ ID NO: 33037
  Description of Unknown: RightRegion for integrase B7092 sequence

SEQ ID NO: 33092 - DNA, 260 bp, Unknown
  Description of Unknown: RightRegion for integrase B7093 sequence
gttcgtacaaaatgcaaatggtgcccccgggcggattcgaaccgtcgacacccgctttaggagatatgatttaatgctaccccctactattcatcaagcatcattgaacaccatataaccgcagataaacatagcagtttgtgtcttttacctccggtagctgcgcctacgcttttacaaacatattactaacagctttagctaaactgcactcaatgaattgttgaaaactattcaaagaaacggagtgcaaagatgtc

SEQ ID NO: 33093 - DNA, 260 bp, Unknown; identical to SEQ ID NO: 33052
  Description of Unknown: RightRegion for integrase B7094 sequence

SEQ ID NO: 33094 - DNA, 260 bp, Unknown
  Description of Unknown: RightRegion for integrase B7095 sequence
atcgataaaatcatcttcaatcgttccctatcttccgttgagttatttttctgtttttgaattataacttttgggatatgggggacctgatggtgagctcggtgcatcacttagatatttaagtcagaggtacacaatgccgttccctgaacttcaagcaacacttaccgacataggtacagaagaacttggtcaccttgaaatgataggcactattgtttatcagctaactaaagacttaacagaagaccaattaaaag

SEQ ID NO: 33095 - DNA, 260 bp, Unknown; identical to SEQ ID NO: 33024
  Description of Unknown: RightRegion for integrase B7096 sequence

SEQ ID NO: 33096 - DNA, 260 bp, Unknown
  Description of Unknown: RightRegion for integrase B7097 sequence
gccttgataagcaaggttcgagtgactagtgaatccatcgttattttatggaaattatagagcgttttagtaaccttcatttcaatcaaggttactaaaattcttgatttgagcataaaaaatacttaataacgcttagccttttttgaaatggtataataaaacaaaaaggagaaatcgagatggagacttgcaaacacacaatagaaattataaacgatgagccagaaaatgtagatacactactttttgctaaaacg

SEQ ID NO: 33097 - DNA, 260 bp, Unknown; identical to SEQ ID NO: 33021
  Description of Unknown: RightRegion for integrase B7098 sequence

SEQ ID NO: 33098 - DNA, 260 bp, Unknown
  Description of Unknown: RightRegion for integrase B7099 sequence
gatcaaattatctacgacaaggaatccggctgcctgtattttgatatcatcatttcctagacaattggatactatccaaatcttcatatttccgtaatactttatttttgtcaaaaagcctgaaatcccgctgtttatgcgggcttcaggcacaattataggttactgcactccggtggaccggagtgtaataacctataatatagatttatatagataaacatataagtccggcatatgacccagcgccgggctggtgg

SEQ ID NO: 33099 - DNA, 260 bp, Unknown
  Description of Unknown: RightRegion for integrase B7100 sequence
gccttgataagcaaggttcgagttactagtgaaagcatcgttattttgtggaaattatagagcgttttactaacctttatttcaatcagcgtaaaagcacgtaattttacggcattcaattttttcaacatcattttcatgacatcattccttccatattttgatacattggtaatagcatagctgcatagatcattacaatcacgacagcaacaataacaaaaatgaggggttgcacaaaggttgttgccttattaaga

SEQ ID NO: 33100 - DNA, 109 bp, Unknown; identical to SEQ ID NO: 33059
  Description of Unknown: RightRegion for integrase B7101 sequence

SEQ ID NO: 33101 - DNA, 109 bp, Unknown
  Description of Unknown: RightRegion for integrase B7102 sequence
aaaatcgaggtcagccccagcaagatgaaaattcattggcgttttaacgccgaaaaataattttaggtttcttgatttccaatagcgtaaacgcgtgccgtttctgctt

SEQ ID NO: 33102 - DNA, 260 bp, Unknown
  Description of Unknown: RightRegion for integrase B7103 sequence
gtagattgcatagtctttaaccgctcaacttctttggttgatatatttctttatatctgattatcacttttcggagtacggtggacctgacggagaactcggcgcatcactcagatatttaagtcagagatttacaatgccgctgccggaattaaaagccaccttaaccgacatcggtaccgaggaattaaatcaccttgaaatgataggtgcaattgtatatcagcttacaaaagacctcacggaagatgaaatcaaaa

SEQ ID NO: 33103 - DNA, 124 bp, Unknown
  Description of Unknown: RightRegion for integrase B7104 sequence
aatatccgagaaaagggcccgcactcacgtgttcgagtacggcccgaatggtggagctgacgggagtcgaacccgtgtccgaaaagaaatcagttagagtatctccgggcgcagtgtgtttatt

SEQ ID NO: 33104 - DNA, 105 bp, Unknown
  Description of Unknown: RightRegion for integrase B7105 sequence
ctaattaaatctattgatgtgtacaacaacgaccgaattaaaatccactggaacatttaattttttaaccatgaaaagatattaggtatcgtccattgaaactgg

SEQ ID NO: 33105 - DNA, 260 bp, Unknown; identical to SEQ ID NO: 33077
  Description of Unknown: RightRegion for integrase B7106 sequence

SEQ ID NO: 33106 - DNA, 260 bp, Unknown
  Description of Unknown: RightRegion for integrase B7107 sequence
attgataaaattgtcttcaatcgttccctatcttccgttgagttatttttctgtttttgaattataacttttggaatatgggggacctgatggtgagctcggtgcatcacttagatatttaagtcagaggtacacaatgccgttccctgaacttcaagcaacacttaccgacataggtacagaagaacttggtcaccttgaaatgataggtactattgtttatcagctaactaaagacttaacagaagaccaattaaaag

SEQ ID NO: 33107 - DNA, 120 bp, Unknown
  Description of Unknown: RightRegion for integrase B7108 sequence
ggcgacgcaaccaaggttacagaaacgaatcttctgctacacttctttaatcctgtataataaaacttgacacatacaaaacaatcaaagtataataaaaacaaaggagtgtgtcatcaa

SEQ ID NO: 33108 - DNA, 109 bp, Unknown
  Description of Unknown: RightRegion for integrase B7109 sequence
atcgataaaatcatcttcaatcgttccctatcttccgttgagttatttttctgtttttgagttataactttgggggtatgggggacctgatggtgagctcggtgcatca

SEQ ID NO: 33109 - DNA, 260 bp, Unknown
  Description of Unknown: RightRegion for integrase B7110 sequence
aaattcattgtatttgaccgaaaagcggatcggttcgaatttcactattacatatcgtaatttcttataaaatcaaggttttgagcactaatctgttactgacatacggcgggcctgacggcgaaatcggcgcttccatgcgctatctttcccagcgttacaccatgccctacgcagagggaaagggacttctgaccgatattggcacagaagagctggcccatatggagattgtggctactattgtctgtcagcttaca

SEQ ID NO: 33110 - DNA, 260 bp, Unknown
  Description of Unknown: RightRegion for integrase B7111 sequence
gtggatcatataatatacgacaaagaagctgatacaatggaattcttctttattccgtaacaagaataagttcccattagtaaacgtctacagaccgccatattgtgatatgattgcctgcgccagcttcgcatttgtctccttgatgttcacgggacattgaagtctcttttcataaatccacatttaacaaccacacgctccttcccaaggccatggaccatcgatccatgcattccaatcgtcgcacgtatccacat

SEQ ID NO: 33111 - DNA, 114 bp, Unknown
  Description of Unknown: RightRegion for integrase B7112 sequence
aaattcattgtatttgaccgaaaagcagatcggttcgaatttcactattacatatcgtaatttcttataaaatcaagattttgagcactaatctgttactgacatacggcgggc

SEQ ID NO: 33112 - DNA, 109 bp, Unknown
  Description of Unknown: RightRegion for integrase B7113 sequence
gtggatcatataatatacgacaaagaagctgatacaatggaattcttctttattccgtaacaagaataagttcccattagtaaacgtctacagaccgccatattgtgat

SEQ ID NO: 33113 - DNA, 109 bp, Unknown
  Description of Unknown: RightRegion for integrase B7114 sequence
aaattcattgtatttgaccgaaaagcggatcggttcgaatttcactattacatatcgtaatctcttgtaaaatcaaggtttccgagactaatctgttactgacatacag

SEQ ID NO: 33114 - DNA, 260 bp, Unknown
  Description of Unknown: RightRegion for integrase B7115 sequence
ccaaaaaaccgcttaaacaagcggctttttattttttgtgttgcatttcgtgttgtatgattgattcgaaatagttatttaccttactgtcaacggcaattctttcggccgagaatgtattttgataaacctttttcatggtcttgtcggtcttccagccgccacgctccatcgcatatttgtcggggatgtttaacatcagcatcacagatgcgtttacatgccgtaagtcgtggaaagtgatgtgtggcaactcgtgt

SEQ ID NO: 33115 - DNA, 260 bp, Unknown
  Description of Unknown: RightRegion for integrase B7116 sequence
gccttgataagcaaggttcgagttactagtgaatccatcgttattttatggaaattatagagcgttttactaacctttatttcaattagcgtaaaagctcgtagtttaacggcattcaatttttttaacatcattttcatgacatcattccttccatattttgatacattggtaatagcatggctgcatagatcattacaatcacgacagcaacaataacaaaaatgaggggttgcacaaaggttgttgccttattaaga

SEQ ID NO: 33116 - DNA, 109 bp, Unknown; identical to SEQ ID NO: 33112
  Description of Unknown: RightRegion for integrase B7117 sequence

SEQ ID NO: 33117 - DNA, 109 bp, Unknown
  Description of Unknown: RightRegion for integrase B7118 sequence
attcagctggaatggacgaaggacgtcaagcgcatcagggacattactttttttacctgattttatgcggggtgatgggggagccgaacggctcatcaagcagcagaag

SEQ ID NO: 33118 - DNA, 260 bp, Unknown
  Description of Unknown: RightRegion for integrase B7119 sequence
aaattcattgtatttgaccgaaaagcagatcggttcgaatttcactattacatatcgtaatttcttataaaatcaaggttttgagcactaatctgttactgacatacggcgggcctgacggcgaaatcggcgcttccatgcgctatctttcccagcgttacaccatgccctacgcagagggaaagggacttctgaccgatattggcacagaagagctggcccatatggagattgtggctgctattgtctgtcagcttaca

SEQ ID NO: 33119 - DNA, 260 bp, Unknown
  Description of Unknown: RightRegion for integrase B7120 sequence
atagaccatatcacatacgaaaaagaagctaataacctcgccatatatttttatctttgacctatatctaaaagcaatacggtgggccgcacggtgaactcggtgcgtcgcttcgctatctttctcagcgatattcaatgccgtatcccgaactcaagggattgcttacagacataggcgttgaggaattggggcaccttgaaatgataggaacaatggtacaccaacttactcgcaatttaacagaggatgagattgaa

SEQ ID NO: 33120 - DNA, 260 bp, Unknown
  Description of Unknown: RightRegion for integrase B7121 sequence
gtagataaaatcgtattcgacaggtcaatcccaaaagtcgatatatttttttatatctgattatcattttttacagtatggtggacctgatggggagttgggggcgtctttgaggtatttgagccagcggtttactatgccgctgccggagctaaaagcaacgcttactgacattggcacagaagagctgaaccaccttgaaatgattggcgctattgtttatcagcttacaaaagacctgacggaagatgagataaaaa

SEQ ID NO: 33121 - DNA, 109 bp, Unknown
  Description of Unknown: RightRegion for integrase B7122 sequence
attcagctggaatggacgaagggcgtcaagcgcatcagggacattactttttttacctgattttatgcggggtgatgggggagccgaacggctcatcaagcagcagaag

SEQ ID NO: 33122 - DNA, 109 bp, Unknown
  Description of Unknown: RightRegion for integrase B7123 sequence
gtggatcatatagtgtacgacaaagaagctgatacaatggaattcttttttattccgtaaaagaataagtacccattagcaaacgtctacagaccgccatattgtgata

SEQ ID NO: 33123 - DNA, 260 bp, Unknown
  Description of Unknown: RightRegion for integrase B7124 sequence
gagttaattgacaaggtgcaagtcacatctgacaagatagttattcgctggaagatttgataaatttagttacgctattttcaatgcaagaaagtaaatttgtcactcgggaaaaaataaaaaaaccttgctaaatgcaaggacacgaactttaaacaatcaactaaatgagccttcgctctacttcgattgtacgcaatttattgaccgatagcctaccacggtctgagccataaggagcgaccctataacttccgtag

SEQ ID NO: 33124 - DNA, 109 bp, Unknown
  Description of Unknown: RightRegion for integrase B7125 sequence
atagaccatatcacatacgaaaaagaagctaataacctcgccatatatttttatctttgacctatatctaaaagcaatacggtgggccgcacggtgaactcggtgcgtc

SEQ ID NO: 33125 - DNA, 109 bp, Unknown
  Description of Unknown: RightRegion for integrase B7126 sequence
atagaccatatcacatacgaaaaagaagctaataacctcgccatttatttttatctttgacctatatctaaaagcaatactgtgggccgcacggtgaactcggtgcgtc

SEQ ID NO: 33126 - DNA, 109 bp, Unknown
  Description of Unknown: RightRegion for integrase B7127 sequence
aaattcgttgtatttgaccgaaagtcggatcgcttcgaatttcactattacatatcatgatttcctgtaaaatcaaggtttccgagactaatctgttactgacatatgg

SEQ ID NO: 33127 - DNA, 109 bp, Unknown
  Description of Unknown: RightRegion for integrase B7128 sequence
atagaccatatcacatacgaaaaagaagctaataacctcgccatatatttttatctttgacctatatctaaaagcaatacggtgggccgcacggggaactcggtgcgtc

SEQ ID NO: 33128 - DNA, 109 bp, Unknown
  Description of Unknown: RightRegion for integrase B7129 sequence
atagaccatataacatacgaaaaagaggataacaacctcgctatttatttttatctctaatctatatctaaaagcaatacggtggacctcagggtgaattaggcgcttc

SEQ ID NO: 33129 - DNA, 260 bp, Unknown
  Description of Unknown: RightRegion for integrase B7130 sequence
gttgacagaatcacttatattaaaccaaaaggaataatcgaaattctttataaaatgtaaatcatatcttcgagcagttaggcggtctaaattgaacaaagatatgattttaggcattgtatcttcttgttactacttattcgccaaaattcgacaattatttttcggtgcggtcttgacttaccgcgagttataggtataatagaatatagaggtaacgtaaattttaatttattatcttttcccacatactttcatgc

SEQ ID NO: 33130 - DNA, 109 bp, Unknown; identical to SEQ ID NO: 33127
  Description of Unknown: RightRegion for integrase B7131 sequence

SEQ ID NO: 33131 - DNA, 260 bp, Unknown
  Description of Unknown: RightRegion for integrase B7132 sequence
atagaccatataacatacgaaaaagaagctaataacctcgctatttatttttatctttgacctatatctaaaagcaatacggtgggccgcacggggaactcggtgcgtcgcttcgctatctttctcagcgatattcaatgccgtatcccgaactcaagggattgcttacagacataggcgttgagcatacacaagaggatttttcactctcataagcgttaatttcccccgaacctgcaaggatttttgcctgccacttt

SEQ ID NO: 33132 - DNA, 260 bp, Unknown
  Description of Unknown: RightRegion for integrase B7133 sequence
gttgacagaatcacttatattaaaccaaaaggaataatcgaaattctttataaaatgtaaatcatatccttgagcagttaggtggtctaaattgaacaaagatatgattttaggcattgtatcttcttgttactacttattcgccaaaattcgacaattattttttggcgcggtcttgacttcccgcgagttataggtataatagaatgtagaggtaacgtaaattttaatttattatcttttcccacatactttcatgc

SEQ ID NO: 33133 - DNA, 109 bp, Unknown
  Description of Unknown: RightRegion for integrase B7134 sequence
atagaccatataacatacgaaaaagaggataacaacctcgctatttatttttatttataatctatatctaaaagcaatacggtggacctcagggtgaattaggcgcttc

SEQ ID NO: 33134 - DNA, 260 bp, Unknown
  Description of Unknown: RightRegion for integrase B7135 sequence
atagaccatataacatacgaaaaagaggataacaacctcgctatttatttttatctctaatctatatctaaaagcaatacggtggacctcagggtgaattaggcgcttcacttcgctatctttcacagcgctattcaatgccgtatccggagcttaaaggtttattgacggacatcggtgtggaagaattagggcatcttgaaatgataggcactatggtgcatcagctcacccgcaatttaaccgaagacgaaattgaa

SEQ ID NO: 33135 - DNA, 109 bp, Unknown; identical to SEQ ID NO: 33117
  Description of Unknown: RightRegion for integrase B7136 sequence

SEQ ID NO: 33136 - DNA, 260 bp, Unknown
  Description of Unknown: RightRegion for integrase B7137 sequence
attgacaaaatcatagtacatgaagagctgaacagctttgaaattatttggaatttttaatctataactctgacaagttttgaaatcacttccacgtgtgcactcatggcaaacatatccaccggctgcacggtttgcacttcataaccgagctcacgtagcacgcaaatatcgcgcgccatggacgccggattacaagacacatacaccatatgtttcggtttcatgatggccgccgcttttaaaacttcctctttaca

SEQ ID NO: 33137 - DNA, 109 bp, Unknown; identical to SEQ ID NO: 33127
  Description of Unknown: RightRegion for integrase B7138 sequence

SEQ ID NO: 33138 - DNA, 88 bp, Unknown
  Description of Unknown: RightRegion for integrase B7139 sequence
gctttaataagcaaggttagggtcactagtgattccatcgttattttatggaaattatagggagttttactatccttcatttcaatca

SEQ ID NO: 33139 - DNA, 109 bp, Unknown
  Description of Unknown: RightRegion for integrase B7140 sequence
atagaccatatcacatacgaaaaagaagctaataacctcgccatttatttttatctttgacctatatctaaaagcaatacggtgggccgcacggggaactcggtgcgtc

SEQ ID NO: 33140 - DNA, 109 bp, Unknown; identical to SEQ ID NO: 33117
  Description of Unknown: RightRegion for integrase B7141 sequence

SEQ ID NO: 33141 - DNA, 260 bp, Unknown
  Description of Unknown: RightRegion for integrase B7142 sequence
atcagtaagataatttatactaagtctggtgaggaaatcgagatttactactatatgtagtgtatatccttttgcagtacggcggaccggacggcgaattgggtgccagcctgcgctatctttcgcaaaagtttgccatgcccaaccgtcgggtcgccggtctcctcaacgatatcggtaccgaagagctggcgcacttggagatgatcggcgccatcgtccatcagcttaccaaaaacctctccatagaggagatcaag

SEQ ID NO: 33142 - DNA, 109 bp, Unknown
  Description of Unknown: RightRegion for integrase B7143 sequence
atagaccatattacatacgaaaaagaagctaataacctcgccatatatttttatctttgacctatatctaaaagcaatatggtgggccgcacggggaactcggtgcgtc

SEQ ID NO: 33143 - DNA, 109 bp, Unknown
  Description of Unknown: RightRegion for integrase B7144 sequence
atagaccatataacatacgaaaaagaggataacaacctcgctatttatttttatctctaatctatatctaaaagcaatacggtggacctcacggtgaattaggcgcttc

SEQ ID NO: 33144 - DNA, 109 bp, Unknown
  Description of Unknown: RightRegion for integrase B7145 sequence
gtggatcatattgtgtacaacaaagaatctgatacaatggaattcttctttgtttcttaaaagggtacttgcaaaaacaagtacccattagcaaacgtctacagaccgc

SEQ ID NO: 33145 - DNA, 260 bp, Unknown
  Description of Unknown: RightRegion for integrase B7146 sequence
aaattcattgtatttgaccgaaaagcggatcggttcgaatttcactattacatatcgtaatctcttgtaaaatcaaggtttccgagactaatctgttactgacatacagtgggcctgacggcgaaatcggcgcttccatgcgctatctttcccagcgttacaccatgccctacgcagagggaaagggacttctgaccgatattggcacagaagagctggcccatatggagattgtggctgctattgtctgtcagcttaca

SEQ ID NO: 33146 - DNA, 260 bp, Unknown
  Description of Unknown: RightRegion for integrase B7147 sequence
attgacaaaatcatagtacatgaagagctgaacagctttgaaattatttggaatttttaatctataactctgacaagttttgaaatcacttccacgtgcgcggtcatcgggaacatatctaccggctgcacggtttctacttcatagccgagcccacgaagcacaacaatatcgcgcgccatagacgccggattacaagacacatacaccatatgttttggtttcattgaggccgccgcttttagcacttcttctttaca

SEQ ID NO: 33147 - DNA, 109 bp, Unknown
  Description of Unknown: RightRegion for integrase B7148 sequence
atagaccatataacatacgaaaaagaggataacaacctcgctatttatttttatctctaatctatatctaaaagcaatatggtggacctcagggtgaattaggcgcttc

SEQ ID NO: 33148 - DNA, 109 bp, Unknown; identical to SEQ ID NO: 33112
  Description of Unknown: RightRegion for integrase B7149 sequence

SEQ ID NO: 33149 - DNA, 260 bp, Unknown
  Description of Unknown: RightRegion for integrase B7150 sequence
aaattcattgtatttgaccgaaaagcagatcggttcgaatttcactattacatatcgtaatttcttataaaatcaaggttttgagcactaatctgttactgacatatggcgggcctgacggagaaatcggcgcttccatgcgctatctttcccagcgttataccatgccctacgcagagggaaaaggacttctgactgacattggcacggaggagctggcccatatggagattgtggctgctatcgtctgtcagcttacg

SEQ ID NO: 33150 - DNA, 260 bp, Unknown
  Description of Unknown: RightRegion for integrase B7151 sequence
atagaccatataacatacgaaaaagaagataataacctcgccatttatttttatctttgacctatatctaaaagcaatacggtgggccgcacggggaactcggtgcgtcgcttcgctatctttctcagcgatattcaatgccgtatcccgaactcaagggattgcttacagacatcggcgttgaggaattggggcaccttgaaatgataggaacaatggtacaccaacttactcgcaatttgacagaggatgagattgaa

SEQ ID NO: 33151 - DNA, 260 bp, Unknown; identical to SEQ ID NO: 33118
  Description of Unknown: RightRegion for integrase B7152 sequence

SEQ ID NO: 33152 - DNA, 260 bp, Unknown
  Description of Unknown: RightRegion for integrase B7153 sequence
attgacaaaataatagtacatgaagagctgaatagctttgaaattatttggaatttttaatctataactctgacaagttttgaaatcacttccacgtgtgcactcatggcaaacatatccaccggctgcacggtttgcacttcataaccgagctcacgtagcacgcaaatatcgcgcgccatggacgccggattacaagacacatacaccatatgtttcggtttcatgatggccgccgcttttaaaacttcctctttaca

SEQ ID NO: 33153 - DNA, 260 bp, Unknown
  Description of Unknown: RightRegion for integrase B7154 sequence
atcagtaagataatttatactaagtctggtgaggaaatcgagatttactactatatgtagtgtatatccttttgcagtacggcgggccggatggcgaactgggcgccagcctgcgctatctttcgcaaaagttcgccatgcccaaccgccgggtcgccggcctgctcaatgatatcggtaccgaggagctggcgcatttggagatgatcggcgccatcgtccaccagctcacccgcaacctctccatcgaggagatcaag

SEQ ID NO: 33154 - DNA, 109 bp, Unknown; identical to SEQ ID NO: 33127
  Description of Unknown: RightRegion for integrase B7155 sequence

SEQ ID NO: 33155 - DNA, 109 bp, Unknown
  Description of Unknown: RightRegion for integrase B7156 sequence
gagttaattgacaaggtacaagtcacatctgacaagatagtgatccgctggaaaatttgataaatttggttacgctattttcaatcagtgtaaaggctttaaccttata

SEQ ID NO: 33156 - DNA, 109 bp, Unknown; identical to SEQ ID NO: 33112
  Description of Unknown: RightRegion for integrase B7157 sequence

SEQ ID NO: 33157 - DNA, 260 bp, Unknown
  Description of Unknown: RightRegion for integrase B7158 sequence
gccttgataagcaaggttagagttactagtgaaaccatcgttattttatggaaattatagagagttttagtgacatttatttcaatcaaggacactaaaattcttgattgagcataaaaaaagacttggcagcccacgctaccaagtgacatgaaaaacaaaaacattcagcgcgtaatcgcctaaagtacatgtatagtgtacctttatttagattaaatgtctaatgctatgcacaaaataaaaaaccgcccataaaa

SEQ ID NO: 33158 - DNA, 109 bp, Unknown
  Description of Unknown: RightRegion for integrase B7159 sequence
ctaattgataaaatcgtcatactaaacgatgatataaaaatctattggtcattttgctaattccagttcgacaatcgtctcaatgtggacggtgtggcagaactggtct

SEQ ID NO: 33159 - DNA, 109 bp, Unknown
  Description of Unknown: RightRegion for integrase B7160 sequence
atagaccatataacatacgaaaaagaggataacaacctcgctatttatttttatctctaatctatatctaaaagcaatacggtggacctcagggtgaattaggtgcttc

SEQ ID NO: 33160 - DNA, 109 bp, Unknown
  Description of Unknown: RightRegion for integrase B7161 sequence
aaattcattgtatttgaccgaaaagcggatcggttcgaatttcactattacatatcgtaatctcttataaaatcaaggttttgagcactaatctgttactgacatacgg

SEQ ID NO: 33161 - DNA, 109 bp, Unknown; identical to SEQ ID NO: 33117
  Description of Unknown: RightRegion for integrase B7162 sequence

SEQ ID NO: 33162 - DNA, 260 bp, Unknown
  Description of Unknown: RightRegion for integrase B7163 sequence
attcagctggaatggacgaaggacgtcaagcgcatcagggatattactttttttacctgattttatgcggggtggtgggggagccgaacggctcatcaagcagcagaagcggtttgcctgtctgcagcgtccgcacaagcgccgcacgctgccgctgcccgccggagcattcgtctgggcggcgattcagcaggtcgcgcagcccgcacgcagcaatgtcgctgacggcggatttcagcgctgcttgccgccgtgtgcca

SEQ ID NO: 33163 - DNA, 147 bp, Unknown
  Description of Unknown: RightRegion for integrase B7164 sequence
gattctatcgtaatccgcagtgaggaaattgaaattcattggaaattcagtgcgttctaactaggcaacatattgtctccacatgccccgtctccggaaacatatccaccggccatgccccgtcagcctgataccccatcttcttaa

SEQ ID NO: 33164 - DNA, 260 bp, Unknown
  Description of Unknown: RightRegion for integrase B7165 sequence
attcagctggaatggacgaaggacgtcaagcgcatcagggacattactttttttacctgattttatgcggggtgatgggggagccgaacggctcatcaagcagcagaagcggtttacctgtctgcagcgtccgcacaagcgccgcacgctgccgctgtccgccggagcattcgtctgggcggcgattcagcaggtcgcgcagcccgcacgcagcaatgtcgctgacggcggatttcagcgctgcttgccgccgtgtgccg

SEQ ID NO: 33165 - DNA, 109 bp, Unknown; identical to SEQ ID NO: 33128
  Description of Unknown: RightRegion for integrase B7166 sequence

SEQ ID NO: 33166 - DNA, 260 bp, Unknown
  Description of Unknown: RightRegion for integrase B7167 sequence
atagaccatatcacatacgaaaaagaagctaataacctcgccatttatttttatctttgacctatatctaaaagcaatacggtgggccgcacggggaactcggtgcgtcgcttcgctatctttctcagcgatattcaatgccgtatcccgaactcaagggattgcttacagacataggcgttgaggaattggggcaccttgaaatgataggaacaatggtacaccaacttactcgcaatttgacagaggatgagattgaa

SEQ ID NO: 33167 - DNA, 260 bp, Unknown
  Description of Unknown: RightRegion for integrase B7168 sequence
atagaccatataacatacgaaaaagaggataacaacctcgctatttatttttatctctaatctatatctaaaagcaatacggtggacctcagggtgaattaggcgcttcacttcgctatctttcacagcgctattcaatgccatatccggagcttaaaggtttattaacggacatcggtgtggaagaattagggcatcttgaaatgataggcactatggtgcatcagctcacccgcaatttaaccgaagacgaaattgaa

SEQ ID NO: 33168 - DNA, 173 bp, Unknown
  Description of Unknown: RightRegion for integrase B7169 sequence
gagctgattgacaaggtgcaagtcacatctgacaagatagtgatccgttggaaaatttgataaatttggttacgctattttcaataaaagaaagtaaatttgtcactcggacaaaaataaaaaaccttgctaaatgcaaggacacgaactttaaacaatcaactaaatgagcc

SEQ ID NO: 33169 - DNA, 260 bp, Unknown
  Description of Unknown: RightRegion for integrase B7170 sequence
atagaccatataacatacgaaaaagaagctaataacctcgccatttatttttatctttgacctatatctaaaagcaatacggtgggccgcacggggaactcggtgcgtcgcttcgctatctttctcagcgatattcaatgccgtatcccgaactcaagggattgcttacagacataggcgttgaggaattggggcaccttgaaatgataggaacaatggtacaccaacttactcgcaatttgacagaggatgagattgaa

SEQ ID NO: 33170 - DNA, 109 bp, Unknown
  Description of Unknown: RightRegion for integrase B7171 sequence
aaattcattgtatttgaccgaaaagcagatcggttcgaatttcactattacatatcgtaatttcttataaaatcaaggttttgagcactaatctgttactgacatacgg

SEQ ID NO: 33171 - DNA, 85 bp, Unknown
  Description of Unknown: RightRegion for integrase B7172 sequence
gtgaaatttcatatttcacagctttttgcaactatttggagagattttagggggtattgaccccaagcggttcgcatccgtgtta

SEQ ID NO: 33172 - DNA, 260 bp, Unknown
  Description of Unknown: RightRegion for integrase B7173 sequence
gagatcatcgaacacatcggcatcgacggcgaagaagtgcacatacactgggcattttaattctaaagcacacactataccagtttatacaaatggctttaaccatttatataaactggcatagtatgaaaacgtccagcagacaaagaaagagccggaatcttcccggccctttctcttacccctcacctatttattccattttcagtgttctcttcattttccctctttcaaaattcaatacaaattcctgcggcata

SEQ ID NO: 33173 - DNA, 260 bp, Unknown; identical to SEQ ID NO: 33150
  Description of Unknown: RightRegion for integrase B7174 sequence

SEQ ID NO: 33174 - DNA, 109 bp, Unknown
  Description of Unknown: RightRegion for integrase B7175 sequence
gcacttattaacaaagttcaagtgactgctgacagtatcaaaattttatggaaaatttaacaaatttagtatcattcatttccacaagtgtaaaagcttctacagactt

SEQ ID NO: 33175 - DNA, 109 bp, Unknown; identical to SEQ ID NO: 33112
  Description of Unknown: RightRegion for integrase B7176 sequence

SEQ ID NO: 33176 - DNA, 260 bp, Unknown
  Description of Unknown: RightRegion for integrase B7177 sequence
gattctatcatcatccgggatgaagagatcgaaattcactggaaattcactgtgttttgactaggcaacttatcacctctacatttgcggttgacggaaacatgtccacagcgcaggccttctccagtttatatccccgttcctgtaataccaccaggtctctggtcagactggtcggcttgcaggaaatgtagaccatgcggtctacgccgaagtcgatgatcttatccagagccttcgggtgaatgccgtcacgcgga

SEQ ID NO: 33177 - DNA, 109 bp, Unknown; identical to SEQ ID NO: 33170
  Description of Unknown: RightRegion for integrase B7178 sequence

SEQ ID NO: 33178 - DNA, 109 bp, Unknown
  Description of Unknown: RightRegion for integrase B7179 sequence
gactccattatcatccgtggcgaagatatagaaattcactggaaatttacttctttttagataggcaacttattgtctccacgttagcagttgccgggaacatgtctac

SEQ ID NO: 33179 - DNA, 109 bp, Unknown
  Description of Unknown: RightRegion for integrase B7180 sequence
gagttaattgaaaaagtgcaagtcacgtctgacaagatagtgatccgctggaaaatttgataaatttggttacgttcatttcaatcagcgtaaaagcttttactttgag

SEQ ID NO: 33180 - DNA, 109 bp, Unknown
  Description of Unknown: RightRegion for integrase B7181 sequence
ataaaacaaataaccctaaaagatgatgaaatggtgatacagtggcgttttgcggtataaatatatttactataccgcatttcaagcaacgtaaaaccgtcatgttttt

SEQ ID NO: 33181 - DNA, 260 bp, Unknown
  Description of Unknown: RightRegion for integrase B7182 sequence
ttagaacgagtaatcttttataagccaagtggagatattgatttatttttttatatttaactatatctttttaatgtctgctccgccgtattgcgtgcatattatttttgcgagctttggattaggattttttattcttataggatattcaagctttttctcgtaaacccacatagctaattaccctcctcgttgttatcccatggccacggatttgaaatccacgcccaacggttggcattatctctttttgcctgaat

SEQ ID NO: 33182 - DNA, 109 bp, Unknown
  Description of Unknown: RightRegion for integrase B7183 sequence
gactctatcattatccgcgggaatgatatcgaaatccattggaaatttactgtgttttaaccaggcaacttatcacctctacgtttgcggtggacgggaacatatctac

SEQ ID NO: 33183 - DNA, 109 bp, Unknown; identical to SEQ ID NO: 33178
  Description of Unknown: RightRegion for integrase B7184 sequence

SEQ ID NO: 33184 - DNA, 109 bp, Unknown
  Description of Unknown: RightRegion for integrase B7185 sequence
atagaccatataacatacgaaaaagaggataacaacctcgctatttatttttatctctaatctatatctaaaagcaatacggtgggcctcagggtgaattaggcgcttc

SEQ ID NO: 33185 - DNA, 109 bp, Unknown; identical to SEQ ID NO: 33127
  Description of Unknown: RightRegion for integrase B7186 sequence

SEQ ID NO: 33186 - DNA, 109 bp, Unknown; identical to SEQ ID NO: 33112
  Description of Unknown: RightRegion for integrase B7187 sequence

SEQ ID NO: 33187 - DNA, 260 bp, Unknown
  Description of Unknown: RightRegion for integrase B7188 sequence
aaattcatcgtattcgaccggaaggcggaacgcttcgaatttcactattacatatcgtaatctcttgtaaaatcaaggtttccgggactaatctgttactgacatatggcgggcctgacggagaaatcggcgcttccatgcgctatctttcccagcgttataccatgccctacgcagagggaaaaggacttctgactgacattggcacggaggagctggcccatatggagattgtggctgctatcgtctgtcagcttacg

SEQ ID NO: 33188 - DNA, 260 bp, Unknown
  Description of Unknown: RightRegion for integrase B7189 sequence
gagctgattgaaaaggtacaagtcacatctgacaaggtagtgatccgctggaaaatttgataaatttggttacgctattttcaatcaagggaagtaaatttgttatttttcgtttaaatagacaatctgaaaaaatgccgttataaacacaaatttcagagcaaacaaaaaaacggtagcataaatgctaccgctgttgttatcttatagagtctctggccacgggtcgtccgttacataggacatattagtaaaccgca

SEQ ID NO: 33189 - DNA, 260 bp, Unknown
  Description of Unknown: RightRegion for integrase B7190 sequence
atcgactggggtaaaggcagatacggaaaaagggatatcaaagacattacttttttttgacctctgtttgtggttaattctagcaccgaacggtgcaagaattaactacaatcaaaaatagaggcgtgcatccatcgggtgcgcgtcttttttacattttcgtcataatcacagaatctattgacaatcatttggatttgtgcaatatagagatatcaaattctgtgtgaaggtggtcttaccatgcccgcgctcatctt

SEQ ID NO: 33190 - DNA, 260 bp, Unknown
  Description of Unknown: RightRegion for integrase B7191 sequence
gtagaccacattacattcaaaaaaccggacaacacactggagatattctactatatttgatggatttttagccgcattttccgccacgaattgaaaagaaagtgcgattttcggcttaacaccgtcattgcctgtccatattttgactctatatctaaatgcaatacagtcctctttattgcatttagatataattaggtatagaaaaaggccgaacagtcttgtgaactgcccggccttttctcacatgagcattgtcg

SEQ ID NO: 33191 - DNA, 260 bp, Unknown
  Description of Unknown: RightRegion for integrase B7192 sequence
gtcagcaggatcgtatttgaccgcaaaagcacacgtgtgaaagtggagtatcacgggtgatttcttatgcgtttcgattgtcagcttttgcaatttggcggacttaattgcaaaaagtgataataagaacacaacaaaaaaccggcagtacagcaggagatttcctgttttgtactgccggttttctgcatagttatgccttatttacacttcccgaaaattatccacgctcacataccccgtgacatacttccctgccg

SEQ ID NO: 33192 - DNA, 109 bp, Unknown
  Description of Unknown: RightRegion for integrase B7193 sequence
gtcagcaggatcgtatttgaccgcaaaaacacgcgggtggaagtggagtatcacgggtgatttcttatgcgttttgattgtcagcttttacgatttggcggcccagacg

SEQ ID NO: 33193 - DNA, 260 bp, Unknown
  Description of Unknown: RightRegion for integrase B7194 sequence
tataaaaagaaaaaaactccaaaagatgattttgaagttgaaatttatctaaatatttagctctacaccaagaatgtagagctattttttatattattataaagagtgttctaaaatagaagaaaataaaaacacacatataaagacgcacgtagatacgtgtgccccaacaaatttatttatctttctattttccattaaataattctccttaatttctcttcttagtatcttatactaattatatcataaattaataa

SEQ ID NO: 33194 - DNA, 109 bp, Unknown
  Description of Unknown: RightRegion for integrase B7195 sequence
tataaaaagaaaaaaactccaaaagatgattttgaagttgaaatttatctaaatatttagctctacactaagaatgtagagctattttttatattattataaagagtgt

SEQ ID NO: 33195 - DNA, 260 bp, Unknown
  Description of Unknown: RightRegion for integrase B7196 sequence
gtagaccacatcacattcaaaaaaccggacaacacactggagatattctactacatttgacgaattttcagtcgcattttccgccacgaattgaaaaataagcgcgatttttggcttaacaccgtcattgactgtccatattttaactctatatctaaatgcaatacgggccgccgtactgactgatgataatggacgcagcgcggggatccgggttcttaatattgatggggtattgcaatttttttatataactaaac

SEQ ID NO: 33196 - DNA, 260 bp, Unknown
  Description of Unknown: RightRegion for integrase B7197 sequence
atcgactggggcaaaggcagatacggaaaaagggatatcaaagacattacttttttttgacctctgtttgtggttaattctagcaccgaacggtgcaagaattaactacaagcaaaaatagaggcgtgcatccatcgggtgcgcgtcttttttacattttcgtcataatcacagaatctattgacaatcatttggatttgtgcaatatagagacatcaaattctgtgtgaaggtggtcttaccatgtccgcgctcatctt

SEQ ID NO: 33197 - DNA, 260 bp, Unknown
  Description of Unknown: RightRegion for integrase B7198 sequence
atagatcatattgtttttaatagagcgagcggtacagtagacgttatttattataattaaatattatatctaaaatatgtatggcgggccatacgtttaaaagatatgtttttagcgcataataaatttatcgtttttttcttcaaccgcctgggcttctaaaagattcttgatttcgccgtagattatcatttgattatggattaatgtgtttaaattttcattgataacttcgagagaatcaagtaaatcctttttac

SEQ ID NO: 33198 - DNA, 260 bp, Unknown
  Description of Unknown: RightRegion for integrase B7199 sequence
tataaaaagaaaaaaactccaaaagatgattttgaagttgagatttatctaaatatttagctctacaccaagaatgtagagctattttttatattattataaagagtgttctaaaatagaagaaaataaaaacatacatataaagacgcacgtagatacgtgtgtcccaataaatttatttatctttctattttccattaaataattctccttaatttctcttcttagtatcttatactaattatctcataaattaataa

SEQ ID NO: 33199 - DNA, 260 bp, Unknown
  Description of Unknown: RightRegion for integrase B7200 sequence
gtagaccacatcacattcaaaaaaccggacaacacactggagatattctactatatttgatgggtttttagccgcattttccaccacgaattgaaaaacaagtgcgatttttggcttaacaccgtcatttactgtccatattttgactctatatctaaatgcaatacagtcctctttattgcatttagatataattaggtatagaaaaaggccgaacagtcttgtgaactgcccggccttttctcacatgagcattgtcg

SEQ ID NO: 33200 - DNA, 260 bp, Unknown
  Description of Unknown: RightRegion for integrase B7201 sequence
gtagaccacatcacattcaaaaaaccggacaacacactggagatattctactatatttgacggatttttagccgcattttctgccacgaattgaaaaataagtgcgatttttggcttaacaccgtcattgactgtccataattttactctatatctaaatgcaatacagtcctctttattgcatttagatataattaggtatagaaaaaggccgaacagtcttgtgaactgcccggccttttctcacatcagcacagctt

SEQ ID NO: 33201 - DNA, 260 bp, Unknown
  Description of Unknown: RightRegion for integrase B7202 sequence
tcttttattgatgttataactattgatggaaattataatattgacattaaatttttataattttttttgcacatttgcttgtactaagttactatcaccacctggttaatgttatttagtacaagcactaaaatagaaagaagtacagtaaaaattatttgtacttctttctgtatactattataatattattagatagttttttcggttctgttggccttattactatctggagcatttactgttgcagcagtagatgc

SEQ ID NO: 33202 - DNA, 260 bp, Unknown
  Description of Unknown: RightRegion for integrase B7203 sequence
ttaatatctaagatcacgatagacggcgatgacatcgcaataacttggacttttacctgaatttttggcaggggtgaacccatgtcctcaatttgggtaaaaaataaattgcgacaggggtattttcatgagcaaaattctttcagaaattgaactactttgcgataaggcggacggccttgccggtcttatctcgaccgtaaccgcggcagccagtaccacaggaatcgaccaccacgcgctcacaggtctttcatatt

SEQ ID NO: 33203 - DNA, 130 bp, Unknown
  Description of Unknown: RightRegion for integrase B7204 sequence
gttgaaaaagttgtctattctaagcctgatgacagcgtaagtatatttttttatctataactatacgcacatggagtacggaggtccgcatggcatgtgcgtataattttttatttttttgaaaaagctg

SEQ ID NO: 33204 - DNA, 260 bp, Unknown
  Description of Unknown: RightRegion for integrase B7205 sequence
tcttttatcgatgttataactattgatggaaattataatattgacattaaatttttataattttttttacacatttacttgtactaagttgctatcaccacctggttaatgttatttagtacaagcactaaaatagaaagaagtacattaaaaattatttgtacttctttctgtatactattataatattattagatagttttttcggttctgttggccttattactatctggagcatttactgttgcagcagtagatgc

SEQ ID NO: 33205 - DNA, 260 bp, Unknown
  Description of Unknown: RightRegion for integrase B7206 sequence
gtagaccacatcacattcaaaaagccggacaacacactggagatattctactatatttgatggatttttagccgcattttccgccacgaattgaaaaataagtgcgatttttggcttaacgccgtcattgtctgtccatattttgactctatatctaaatgcaatacagtccgccgtactgactgatgataatggacgcagcgcggggatccgggttcttaatattgatggggtattgcaatttttttatataactaaac

SEQ ID NO: 33206 - DNA, 260 bp, Unknown
  Description of Unknown: RightRegion for integrase B7207 sequence
atcaaaaatatcatagttgacggcagcagaatcacagtaaatttacggctcaaaaaataattcaacctaaaaaaagaggcttttttataataaaaacctctttttttcttgacaaatatatttaacggctctaaaatagaggtgaagctcagaaaaattgaatagtccattggcgcaataatgaagtaacgctataaatgttaacttcaatagggcgataaaatattatatcggaaacataagctcaatatcgaaatcca

SEQ ID NO: 33207 - DNA, 260 bp, Unknown
  Description of Unknown: RightRegion for integrase B7208 sequence
atagatcatattgtttttaatagagcgagcggtacagtagacgttatttattataattaaatattatatctaaaatatgtatggcggtctatacatttaaaagatatatttttaatgcataataaatttatcgattttttctttaatcccctgggcttctaaaagttttttgatttcaccgtagattatcatttgattatggattaatgtgtttaagttttcattgataacttcgagagaatcaagcaaatcctttttat

SEQ ID NO: 33208 - DNA, 260 bp, Unknown
  Description of Unknown: RightRegion for integrase B7209 sequence
atcgactggggcaaaggcagatacggaaaaagggatatcaaagacattacttttttttgacctctgtttgtggttaattctagcaccgaacggcgcaagaattaaccacaagcaaaaatagaggcgtgcatccatcgggtgcgcgtcttttttacattttcgtcaaaatcacagaatctattgacaatcatttggatttgtgcaatatagagatatcaaattctgtgtgaaggtggtcttaccatgtccgcgctcatctt

SEQ ID NO: 33209 - DNA, 260 bp, Unknown
  Description of Unknown: RightRegion for integrase B7210 sequence
atagatcatattgtttttaatagagcgagcggtacagtagacgttatttattataattaaatattatatctaaaatatgtatggcgggccatacatttaaaagatatgtttttagcgcataataaatttatcgtttttttcttcaaccgcctgggcttctaaaagtttcttgatttcgctgtagattatcatttgattatggattaatgtgtttaaattttcattgataacttcgagagaatcaagcaaatcctttttac

SEQ ID NO: 33210 - DNA, 260 bp, Unknown
  Description of Unknown: RightRegion for integrase B7211 sequence
ataatagatgaaatcgaaatggtaaatgattatagattctacatccatttaaaattttaggagcggctatgttaataataaaagagaaaattttggaaaaatattcaattttggaattaaaaaagatctttggaagttggttcttatattttaaaagaagtgattttaaaggcgagctgtataatataacctcttatttaactataaataatttggattattctcttgaagaatttaagaaagattatcccaaattatca

SEQ ID NO: 33211 - DNA, 244 bp, Unknown
  Description of Unknown: RightRegion for integrase B7212 sequence
attgacaggatcgtaatctatccggatcacatagatattcattggacctttacggcataaaaagaggaggcggtgtgatccgtctcctctttccttatggacttgcgctggcgcaattcccgtttttccttgtatttccggacttttttagtatcccatgcctgcctggggctgtgtcgaagtgtttgcaggctctttgatgttggcaacagctgcctcggtggtcaggaacgtagatgctaca

SEQ ID NO: 33212 - DNA, 260 bp, Unknown
  Description of Unknown: RightRegion for integrase B7213 sequence
gtagatcacatcacattcaaaaagccggacaacacactggagatattctactatatttgatggattttcagtcgcattttccgccacgaattgaaaaacaagtgcgatttttggcttaacgccgtcattgattgtccatattttgactctatatctaaatgcaatacagtcctctttattgcatttagatataattagcgtagaaaaaggccgaacagtcttgtgaaccgcccggccttttctcacatgagcattgtcga

SEQ ID NO: 33213 - DNA, 260 bp, Unknown
  Description of Unknown: RightRegion for integrase B7214 sequence
gtagaccacatcacattcaaaaagccggacaacacactggagatattctactatatttgatggatttttagccacattttccgccacgaattgaaaaacaagtgcgatttttggcttaacaccgtcatttactgtccatattttgactctatatctaaatgcaatacagtcctctttattgcatttagatataattaggtatagaaaaaggccgaacagtcttgtgaactgcccggccttttctcacatgagcattgtcg

SEQ ID NO: 33214 - DNA, 260 bp, Unknown
  Description of Unknown: RightRegion for integrase B7215 sequence
gtagatcacatcacattcaaaaaaccggacaacacactggagatattctactatatttgatggatttttagccgcattttccgccacgaattgaaaaataagtgcgatttttggcttaacaccgtcattgcctgtccatattttgactctatatctaaatgcaatacagtcctctttattgcatttagatataattggtatagaaaaaggccgaacagtcttgtgaactacccggcctttttttacatcagcattgtcga

SEQ ID NO: 33215 - DNA, 260 bp, Unknown
  Description of Unknown: RightRegion for integrase B7216 sequence
tacgacaaagagaatgatacactaatcttccacctctacactcccagaaaagccgcataaacagcggctttgagggacttctaggttacagggataagggggtccttacatcagtaacctagatgtgtgtttttatctatataataagatgatacaatattccctcccagattgccagtctgggaggatttttcttttattttaccctaattttctgcccagcataaatcttatttggatttgcaataccgttcatctgt

SEQ ID NO: 33216 - DNA, 260 bp, Unknown
  Description of Unknown: RightRegion for integrase B7217 sequence
atcgactggggcaaaggcagatacggaaaaagggatatcaaagacattacttttttttgacttctgtttgtggttaattctagcaccgaatggtgcaagaattaactacaatcaaaaatagaggcgtgcatccatcgggtgcgcgtcttttttacatttttgtcataatcacagaatctattgacaatcatttggatttgtgcaatatagagatatcaaattctgtgtgaaggtggtcttaccatgtccgcgctcatctt

SEQ ID NO: 33217 - DNA, 260 bp, Unknown
  Description of Unknown: RightRegion for integrase B7218 sequence
actttaatcgatagaattacagttacaggtgatgatgtaagaatagattggactttttaaaaattattaccaattagttgcaatgatggtgataactgtcccaccagccaataataacccttttaaactgttctccattcctctcttactacaacatcttttcccctaacgttatgttcaaaaatgttgcttttcctcccttcttgttttctttatttttctttatcatttattaactgcaggatttaaaagaatagttt

SEQ ID NO: 33218 - DNA, 260 bp, Unknown
  Description of Unknown: RightRegion for integrase B7219 sequence
gtagaccacatcacattcaaaaaaccggacaacacactggagatattctactacatttgacgaatttttagccgcatttttcgccacgaattgaaaaataagtgcgatttttgccttaacaccgtcattgactgtccatattttgactctatatctaaatgcaatacagtccgccgtactgactgatgataatggacgcagcgcggggatccgggttcttaatattgatggggtattgcaatttttttatataactaaac

SEQ ID NO: 33219 - DNA, 260 bp, Unknown; identical to SEQ ID NO: 33210
  Description of Unknown: RightRegion for integrase B7220 sequence

SEQ ID NO: 33220 - DNA, 260 bp, Unknown
  Description of Unknown: RightRegion for integrase B7221 sequence
atcgactggggtaaaggcagatacggaaaaagggatatcaaggacattacttttttttgacctctgtttgtggttaattctagcaccgaacggcgcaagaattaactacaagcaaaaatagaggcgtgcatccatcgggtgcgcgtcttttttacattttcgtcataatttgtaattctattgacaatttcaaaataatgtgcatgatatattgcagatacaaaatattccactattgggaggcaacgcaaatgaaagtt

SEQ ID NO: 33221 - DNA, 260 bp, Unknown
  Description of Unknown: RightRegion for integrase B7222 sequence
gtagatcacatcacattcaaaaaaccggacaacacactggagatattctactatatttgatggattttcaaccgcattttccgccacgaattgaaaaataagtgcgatttttggcttaacaccgtcatttactgtccatattttgactctatatctaaatgcaatacagtccgccgtactgactgatgataatggatgcagcgcggggatccgggtttttaatattgatggggtattgcaatttctttatataactaaac

SEQ ID NO: 33222 - DNA, 260 bp, Unknown
  Description of Unknown: RightRegion for integrase B7223 sequence
tatgacaaagaaagcgacaccctgaccttccgcctctacagccctaagaaagccgcataaacagcggctttggggcacttataggttacgggagtaagggggcccagacccccgtaacctagaagtgggttgttatctattaaaatgcaatgtttataataggatgatacaatattattccccggttggcaaccggggaatctgtttacaatttatttattatctgctatacttcttttagtggagagcggtggcaagcc

SEQ ID NO: 33223 - DNA, 260 bp, Unknown
  Description of Unknown: RightRegion for integrase B7224 sequence
tataaaaagaaaaaaactccaaaagatgattttgaagttgagatttatctaaatatttagctctacaccaagaatgtagagctattttttatattattataaagagtgttctaaaatagaagaaaataaaaacatacatataaagacgcacgtagatacgtgtgccccaataaatttatttatctttctattttccattaaataattctccttaatttctcttcttagtatcttatactaattatatcataaattaataa

SEQ ID NO: 33224 - DNA, 260 bp, Unknown
  Description of Unknown: RightRegion for integrase B7225 sequence
ctctctcgtatcgtatacgaaaagaagaagcaaaacctcgccctttatttttacatctgattataaccactatttgcagtctggaccgccgtattgtgagataatgaatttcgcaagcgccggattcgggtttgcgatttttaccgggtattgcagcttcttctcatatacaaacatatttagccctccatacccgctttatagtcccacggccacgggtttttgagccatgtatatgacttgcactgacttacgtcaca

SEQ ID NO: 33225 - DNA, 260 bp, Unknown
  Description of Unknown: RightRegion for integrase B7226 sequence
ctgaaatgcatcgttttcgaccggaagaccgagcattttgattttcaatattatgcatgattatgcatgaaatagcggagaaccttgaaaaataaggctctccgcttattataggttactgcactttagaccgccatactggctcattatatattgcgcgatcttcggattcggcgtcttgatattgactggatattgtaatcttttttcatatctccacatacgctacacctccccttcccacggccagcgctctgtaa

SEQ ID NO: 33226 - DNA, 260 bp, Unknown
  Description of Unknown: RightRegion for integrase B7227 sequence
gtagaccacatcacattcaaaaaaccggacaacacactggagatattctactatatttgatggattttcagtcgcattttccgccacgaattgaaaaacaagtgcgatttttggcttaacgccgtcattgattgtccgtattttgactctatatctaaatgcaatacaggcctctttattgcatttagatataattaggtatagaaaaaggccgaacagtcttgtgactgcccggccttttctcacatgagcattgtcga

SEQ ID NO: 33227 - DNA, 260 bp, Unknown
  Description of Unknown: RightRegion for integrase B7228 sequence
attacgcgaatccagcgtcccgacgggtactggattgaaatagtaaaagagaaagaatgattatataaattattacgcaaaaattacgaaaagagcctccggcgtttaatcgccagaggctcttttgtgttctcatagcccaacactcccgccatcggggaaagaaaagccaatttttgctgtcgcgcccaacgcattagctatacgctgccactcatcaaccgtaaacttgccagtgttcagacgcttgttgagaagtt

SEQ ID NO: 33228 - DNA, 109 bp, Unknown
  Description of Unknown: RightRegion for integrase B7229 sequence
gtcagtaagattgtatttgaccgcaaaaacacacgtgtggaagtggaatatcacgggtgatttttttatgcagtccggttatcagcttttgcagcttggcggcccagac

SEQ ID NO: 33229 - DNA, 260 bp, Unknown
  Description of Unknown: RightRegion for integrase B7230 sequence
ttgatagaaaaaatagtgataaaaggcgaggatataaagatatattggaggtttgtctaattctgcccccaaacataacgcagttttgttactgagtcatgcaaaattgatattcttaaattatccgtttctgcctcaagtaatgggttattcttattaaattgtacgttcattaaattgcttattcttgtataaaactgctgaataaaattatcgtctaatgtaaagcctttaattttataccttcccttatttaaatc

SEQ ID NO: 33230 - DNA, 260 bp, Unknown
  Description of Unknown: RightRegion for integrase B7231 sequence
gagaaaatcgtcttcgaccgtccgcacaatgcccttcattacttctatcgctactcgtaaacacacgtttttccgtggttttcggaaatcatatgttactggcatacggtggactgtataccagtaacatatgattttctgcatttcgcccttttacttttttatatattattctattgacaaaccagataaaaatcgtttatcatgcaactaaagagtagttgcatgataaggaggtgtgaattttgaagtatgagtaa

SEQ ID NO: 33231 - DNA, 260 bp, Unknown
  Description of Unknown: RightRegion for integrase B7232 sequence
gtagatcacatcacattcaaaaagccggacaacacactggagatattctactatatttgatggatttttagccgcattttccgccacgaattgaaaaataagtgcgatttttggcttaacgccgtcattgattgtccatatttttactctgtatctaaatgcaatacaggccgccgtactgactgatgataatggacgcagcgcggggatccggattcttaatattgatggggtattgcaatttttttatataactaaac

SEQ ID NO: 33232 - DNA, 260 bp, Unknown
  Description of Unknown: RightRegion for integrase B7233 sequence
gtagaccacatcacattcaaaaaaccggacaacacactggagatattctactacatttgacgaattttcagtcgcattttccgccacgaattgaaaaataagcgcgatttttggcttaacaccgtcattgactgtccatattttaactctatatctaaatgcaatacgggccgccgtactgactgatgataatggacgcagcgcggggatccgggttcttaatattgatggggtattgcaatttctttatataactaaac

SEQ ID NO: 33233 - DNA, 260 bp, Unknown
  Description of Unknown: RightRegion for integrase B7234 sequence
gtagatcacatcacattcaaaaaaccggacaacacactggagatattctactatatttgacggatttttagccgcattttctgccacgaattgaaaaataagtgcgatttttggcttaacaccgtcattgactgtccataattttactctatatctaaatgcaatacagtccgccgtactgactgatgataatggaggcagcgcggggatccgggttcttaatattgatggggtattgcaatttttttatataactaaac

SEQ ID NO: 33234 - DNA, 260 bp, Unknown; identical to SEQ ID NO: 33210
  Description of Unknown: RightRegion for integrase B7235 sequence

SEQ ID NO: 33235 - DNA, 86 bp, Unknown
  Description of Unknown: RightRegion for integrase B7236 sequence
atagatcatattgtttttaatagagcgagcggtacagtagacgttatttattataattaaatattatatctaaaatatgtatggcg

SEQ ID NO: 33236 - DNA, 260 bp, Unknown
  Description of Unknown: RightRegion for integrase B7237 sequence
gtagaccacatcacattcaaaaaaccggacaacacactggagatattctactatatttgatggaattttagccgcattttccgccacgaattgaaaaataagtgcgatttttggcttgacaccgtcattgactgtccatattttaactctatatctaaatgcaatacgggcctctttattgcatttagatataattagcgtagaaaaaggccgaacagtcttgtgaactgcccggccttttctcacatgagcattgtcga

SEQ ID NO: 33237 - DNA, 108 bp, Unknown
  Description of Unknown: RightRegion for integrase B7238 sequence
gaaagaagtgatgaatggcaagcttatgaattaaaaattgtagaaatggagtttaattgatggtatattgaattaaacttctttttatgtattacaagaggttttgcc

SEQ ID NO: 33238 - DNA, 109 bp, Unknown
  Description of Unknown: RightRegion for integrase B7239 sequence
atagatcatattgtttttaatagagcgagcggtacagtagacgttatttattataattaaatattatatctaaaatatgtatggcgggcctgacggcgaattaggagct

SEQ ID NO: 33239 - DNA, 260 bp, Unknown
  Description of Unknown: RightRegion for integrase B7240 sequence
gtagatcacatcacattcaaaaaaccggacaacacactggagatattctactatatttgatggattttcagccgcattttccgccatgaattgaaaaacaagtgcgatttttgacttaacaccgtcattcactgtccatattttgactctatatctaaatgcaatacaggccgccgtactgactgatgataatggacgcagcgcggggatccgggttcttaatattgatggggtattgcaatttttttatataactaaac

SEQ ID NO: 33240 - DNA, 260 bp, Unknown
  Description of Unknown: RightRegion for integrase B7241 sequence
tatgacaaagaaagtgacaccctgaccttccgcctctacagccctaagaaagccgcataaacagcggctttggggcacttataggttacgggagtaagggggccctgacggagaaatgggcgcctccatgcgatatctgtcccagcgattcgccatgaccaaccggatagctatgggaacattgacggatatcggaaccgaagaattggggcatttggaaatggtagccaccattgttcaccagcttacccgcaacctct

SEQ ID NO: 33241 - DNA, 260 bp, Unknown
  Description of Unknown: RightRegion for integrase B7242 sequence
tataaaaagaaaaaaactccaaaagatgattttgaagttgaaatttatctaaatatttagctctacaccaagaatgtagagctattttttatattattataaagagtgttctaaaatagaagaaaataaaaacatacatataaagacgcacgtagatacgtgtgccccaataaatttatttatctttctattttccattaaataattctccttaatttctcttcttagtatcttatactaattatatcataaattaataa

SEQ ID NO: 33242 - DNA, 260 bp, Unknown
  Description of Unknown: RightRegion for integrase B7243 sequence
tataaaaagaaaaaaactccaaaagatgattttgaagttgaaatttatctaaatatttagctctacactaagaatgtagagctattttttatattattataaagagtgttctaaaatagaagaaaataaaaacatacatataaagacgcacgtagatacgtgtgccccaataaatttatttatctttctattttccattaaataattctccttaatttctcttcttagtatcttatactaattatatcataaattaataa

SEQ ID NO: 33243 - DNA, 260 bp, Unknown
  Description of Unknown: RightRegion for integrase B7244 sequence
gagctgattgaaactatatatattgacggaaaggaggtttctattaactggcgcatctgattacaaatttgtatatgctatacaaattatatatacatttttgtaatcatcttaaaattcttatactcaacaactattactttattacgcagaatatagccatggtaataaatacttgttgaaataaggcaaaaaatggaatattctgtagaagcagaggagaatggaaaatgataaagaaacgcaaaccaagtgcaaac

SEQ ID NO: 33244 - DNA, 260 bp, Unknown
  Description of Unknown: RightRegion for integrase B7245 sequence
tataaaaagaaaaaaactccaaaagatgattttgaagttgaaatttatctaaatatttagctctacaccaagaatgtagagctattttttatattattataaagagtgttctaaaatagaagaaaataaaaacatacatataaagacgcacgtagatacgtgtgtcccaataaatttatttatctttctattttccattaaataattctccttaatttcttttcttagtatcttatactaattatatcataaattaataa

SEQ ID NO: 33245 - DNA, 260 bp, Unknown
  Description of Unknown: RightRegion for integrase B7246 sequence
gatcgtatcgtctatgaaaaggcttccggaaccatgtatttcgactttttcgtttcctgatttttgttccgaaagtccgcaaacccgcataaacactggatttttccgtatcatctggtacggaactccgggccaccatactgactcatgataatttgggcgattttggggtttggtgtcgtgatgtttacaggatactcgaggcgtttttcataattccacatccgtcagcaccctcctttccggttgacttcccacgg

SEQ ID NO: 33246 - DNA, 260 bp, Unknown
  Description of Unknown: RightRegion for integrase B7247 sequence
gtagatcacatcacattcaaaaagccggacaacacactggagatattctactatatttgatggatttttagccgcattttccgccacgaattgaaaaataagtgcgatttttggcttaacaccgtcattgactgtccgtattttgactctatatctaaatgcaatacaggcctctttattgcatttagatataattaggtatagaaaaaggccgaacagtcttgtgaactgcccggccttttctcacatgagcattgtcg

SEQ ID NO: 33247 - DNA, 260 bp, Unknown; identical to SEQ ID NO: 33210
  Description of Unknown: RightRegion for integrase B7248 sequence

SEQ ID NO: 33248 - DNA, 260 bp, Unknown
  Description of Unknown: RightRegion for integrase B7249 sequence
gagaaaatcgtcttcgaccgtccgcacaatgcccttcactacttctaccactattcgtaaagccgcgctttcccgtggctttccaaaatcatatgttactggtgtatggtggactgtataccagtaacatataattttctgcttttcgcccttttacttttttatatattattctattgacaaaccagataaaaatcgtttatcatgcaactaaagagtagttgcatgataaggaggtgtgaattttgaagtatgagtaa

SEQ ID NO: 33249 - DNA, 260 bp, Unknown
  Description of Unknown: RightRegion for integrase B7250 sequence
gcagttgtaactagggatggcgaacaggaaatgttaagaaaacgaatcgatgagatgtgacagttcctgcagacacagacaaatcgaattacagagtacgatgaacagatggtcagaaggcttattgagaagattacggtctttgatgataagcttatctttgaattcaaatccggcatgacacttgaacttaagagataattgaaggaataaaactatacagacaccttgcagcgatgcagggtgtttttttcgttcat

SEQ ID NO: 33250 - DNA, 260 bp, Unknown
  Description of Unknown: RightRegion for integrase B7251 sequence
gtagatcacatcacattcaaaaagccggacaacacactggagatattctactatatttgatggatttttagccgcattttccgccacgaattgaaaaataagtgcgatttttggcttaacgccgtcattgattgtccatatttttactctgtatctaaatgcaatacaggcctctttattgcatttagatataattagtatagataaaggccgaacagtcttgtaaactgcccggccttttctcacatcagcattgtcga

SEQ ID NO: 33251 - DNA, 260 bp, Unknown
  Description of Unknown: RightRegion for integrase B7252 sequence
atcgactggggcaaaggcagatacggaaaaagggatatcaaagacattacttttttttgacttctgtttgtggttaattttagcaccgaacggcgcaagaattaactacaagcaaaaatagaggcgtgcatccatcgggtgcgcgtcttttttacattttcgtcataatcacagaatctattgacaatcatttggatttgtgcaatatagagatatcaaattctgtgtgaaggtggtcttaccatgtccgcgctcatctt

SEQ ID NO: 33252 - DNA, 109 bp, Unknown; identical to SEQ ID NO: 33192
  Description of Unknown: RightRegion for integrase B7253 sequence

SEQ ID NO: 33253 - DNA, 260 bp, Unknown
  Description of Unknown: RightRegion for integrase B7254 sequence
attgaaaaaatccttgttgacccccgcaataaaactatggacatttatttttttgcctaacggtgtaacaacctgtactgatagcacatacagtacaggttgttacattatttgtacttatgcgtgaagccctttattttcaaggctttctgtcttcaaaatccatcaattcacgaatatcatttacttgcaaggcttccgctatccgtgccagatgttcaaagtttaaaacagttttgctttcacgcactatttcacta

SEQ ID NO: 33254 - DNA, 260 bp, Unknown
  Description of Unknown: RightRegion for integrase B7255 sequence
atcagcaagatagtatatactaaatccaatgaagaaatcgagatgtactactatatgtagtgcatctccttttgcaatatggtggacccgatggcgaattgggcgccagcctgcgctacctttcgcagaaatttgccatgcccaaccgccgggtcgccggtctcctcaatgatattggcaccgaggagctggctcatctggagatgatcggcaccatcgtccaccagctcaccaggaatctctccatcgaagagatcaaa

SEQ ID NO: 33255 - DNA, 260 bp, Unknown
  Description of Unknown: RightRegion for integrase B7256 sequence
tttattacgcgaatccagcaaccggacgggtactggatcgagatcgtgccggaaaaatgagcctgcgcatgggggagacgcgaaagcgcctccccatttttgcgccggaggcaggggctgcgtggttgcattttgcttgaaaatgatgtaaattggaaggcgtaggaaacaggagggggacggatatgggattcttaaggagcaaaaaggggagcattatcagcgattatttctgcgctgcagacgacatcgggccgttt

SEQ ID NO: 33256 - DNA, 260 bp, Unknown
  Description of Unknown: RightRegion for integrase B7257 sequence
ccaccaaagagagaacaggttgaagcatttatgtctaatgtaggggaagtgtctttgtagccttgcccgaattgtaccatcgtgaaaccaagcccctccagattttgcgacatctgcactgcaccccagcggtcaaatgcaatttctttgatgtgaaacttctgtcccagttcatcgatgaagttttcgataaaaccgtagtgaaccacatttccctcagtcgttttcaggtagccttgccgttcccatacatcatatgg

SEQ ID NO: 33257 - DNA, 109 bp, Unknown
  Description of Unknown: RightRegion for integrase B7258 sequence
ttgaaatgcatcattttcgatcggaagaccgagcattttgattttcaatattatgcatgaaatagcggagaaccttgaaaaataaggctctccgcttattataggttac

SEQ ID NO: 33258 - DNA, 260 bp, Unknown
  Description of Unknown: RightRegion for integrase B7259 sequence
cagctaattaaaagtattgatgtaactaatgaagagttgactatcaattggaatatttaactctttttgaatagttttagagagtgtcatttcaagcaaggtgaagcctgattgttttttctttaaaattttcattaataaactccttggaatgaatgataaattggcaataagatactaagatataaaataacaattatgattgcaataatgctaaagataactggttgaacaaaaatcaataaatgttcaattgcagt

SEQ ID NO: 33259 - DNA, 260 bp, Unknown
  Description of Unknown: RightRegion for integrase B7260 sequence
gacggaatcacctatgataaggagaaaaaacggctgtattttaactttttcatttcatgaaaaaacgccggaagccccattttataagggcttccggcgatttgtagggtattgcaatcggggccaccggagttcaatagcctatataggttttcttttaataggaagaaactcttttcaaatttatatgttttttgagatgatacaatatttttctacccggtagctgccaactaccgggtagattttaatacttctgc

SEQ ID NO: 33260 - DNA, 109 bp, Unknown
  Description of Unknown: RightRegion for integrase B7261 sequence
atttccaaaattgtctttaataaagccaaaaattcactcgatttgtttttttacttgtagtgtcgtatgttttagcaatacggcggacctgacggcgaattaggagcaa

SEQ ID NO: 33261 - DNA, 260 bp, Unknown
  Description of Unknown: RightRegion for integrase B7262 sequence
ccaccaaagagagaacaggttgaagcatttatgtctaatgtaggggaagtgtctttgtaaccctgcccgaactgcaccatcgtaaaaccaagcccctccagattctgtgacatctgcaccgcaccccaacggtcgaaagcaatctctttgatgtgaaatttctgccccagttcatcgatgaaattttcgataaaaccgtagtgaaccacattcccctcagtggttttcagaaagccttgccgttcccatacatcataagg

SEQ ID NO: 33262 - DNA, 109 bp, Unknown
  Description of Unknown: RightRegion for integrase B7263 sequence
gatcgtatcgtctatgaaaaggcttccgggacgatgtatttcgactttttcgtctcctgatttttttccgaaagtccgcaaacccgcataaacactcaatgtcattaac

SEQ ID NO: 33263 - DNA, 109 bp, Unknown
  Description of Unknown: RightRegion for integrase B7264 sequence
ttgaaatgcatcgttttcgaccggaagaccgagcattttgattttcaatattatgcatgaaatagcggagaaccttgaaaaataaggctctccgcttattataggttac

SEQ ID NO: 33264 - DNA, 240 bp, Unknown
  Description of Unknown: RightRegion for integrase B7265 sequence
gatagtattgtgtacaataaggattccggaactatgttttttgatttttttgtttcttgattttccggcaaaaaagcccggaaacccgcataaatactgaggttttgggcttatcatctggtattaccatccgggccaccatactgactcatgataatttgggcgattttggggtttggtgtcgtaatgtttacaggatactcgaggcgtttttcataattccacatccgtcagcaccct

SEQ ID NO: 33265 - DNA, 260 bp, Unknown
  Description of Unknown: RightRegion for integrase B7266 sequence
ttgaaatgcatcgttttcgaccggaagaccgagcattttgattttcaatattatgcatgaaatagcggagaaccttgaaaaataaggctctccgcttatcataggttactgcactttagaccgccatactggctcattacatattgcgcgatcttcggattcggcgtcttgatattgactggatattgtaatcttttttcatatctccacatacgctacacctccccttcccacggccagcgctctgtaagccaggacca

SEQ ID NO: 33266 - DNA, 260 bp, Unknown
  Description of Unknown: RightRegion for integrase B7267 sequence
ccaccaaagagagaacaggttgaagcatttatgtctaatgtaggggaagtgtctttataaccctgtccaaattgcaccatcgtgaatccaagtccttccaaattctgtgacatctgcactgcaccccagcggtcaaatgcaatttctttgatgtgaaatttctgccccagttcatcgatgaaattctcaataaaaccatagtgaaccacatttccctcagtcgttttcaagtagccttgccgttcccatatatcatatgg

SEQ ID NO: 33267 - DNA, 260 bp, Unknown
  Description of Unknown: RightRegion for integrase B7268 sequence
ggatattacacgaacacctactttttcaaaggcggctttgccgtaagggtgtggctgtgatgtcataaaacacaaaacgaggtttaaggcacgatgtgccctgaacctcgttttttatatgctcgtgccttatttggattcggtgtccaatcataataggcagatcaccgcaagcaatgcgagtgttcatatacactcacatcctctgcttgttgggtgctatacccccgctggacacagaatttattctgtggctgcgc

SEQ ID NO: 33268 - DNA, 138 bp, Unknown
  Description of Unknown: RightRegion for integrase B7269 sequence
gatcgtatcgtctatgaaaaagcttccgggaccatgtatttcgactttttcgtttcctgatttttgttccgaaagtccgtaaacccgcataaacactggattttttcgtatcatctggtacggaactccggtccaccg

SEQ ID NO: 33269 - DNA, 234 bp, Unknown
  Description of Unknown: RightRegion for integrase B7270 sequence
gatcgtatcgtctatgaaaaggcttccggaaccatgtatttcgactttttcgtctcctgatttttttccgaaagtccgcaaacccgcataaacactggatttttccgtatcatctggtacggaactccgggccaccgtactgactcatgataatttgggcgattttggggtttggtgttgtgatgtttacaggatactcgaggcgtttttcataattccacatccgtcagcacc

SEQ ID NO: 33270 - DNA, 260 bp, Unknown
  Description of Unknown: RightRegion for integrase B7271 sequence
gacgggattacctacgataaggagaaaaataggctgtattttaactttttcatttcatgaaaaaacgccgggaagccccattttataagggtttccggcgatttgtagggtattgcaatcggggccaccgtattgtgatgcaataatcttcgcgatccctgcatccgtttttgtgatatttaccggatattgcaatcgtttttcatatatccacatacactaacacctgcctttcccggatctttcccatggccatggct

SEQ ID NO: 33271 - DNA, 260 bp, Unknown; identical to SEQ ID NO: 33270
  Description of Unknown: RightRegion for integrase B7272 sequence

SEQ ID NO: 33272 - DNA, 260 bp, Unknown
  Description of Unknown: RightRegion for integrase B7273 sequence
ctgaaatgcattgttttcgaccggaagaccgagcattttgattttcaatattatgcatgaaatagcggagaaccttgaaaaataaggctctccgcttattataggttactgcactttagaccgccgtactggctcattatatattgcgcgatcttcgggttcggtgtcttgatattgaccggatactgtaatcttttttcatatctccacatacgctacacctccccttcccacggccagcgctctgtgagccaggacca

SEQ ID NO: 33273 - DNA, 260 bp, Unknown
  Description of Unknown: RightRegion for integrase B7274 sequence
ttgaaatgcatcgttttcgaccggaagaccgagcattttgattttcaatattatgcatgaaatagcggagaaccttgaaaaataaggctctccgcttattataggttactgcactttagaccgccatactggctcattacatattgcgcgatcttcggattcggcgtcttgatattgactggatattgtaatcttttttcatatctccacatacgctacacctccccttcccacggccagcgctctgtaagccaggacca

SEQ ID NO: 33274 - DNA, 260 bp, Unknown
  Description of Unknown: RightRegion for integrase B7275 sequence
gacggaatcacctatgataaggagaaaaaccggttgtattttaactttttcatttcataaaaaacgccgggaagccccattttataagggtttccggcaatttgtagggtattgcaatccgggccaccgtattgtgatgcaataatcttcgcgatccgtgcatccgttttcgtgatatttaccggatattgcaatcgtttttcatatatccacatacactaacacctgcctttcccggatctttcccatggccatggctg

SEQ ID NO: 33275 - DNA, 260 bp, Unknown
  Description of Unknown: RightRegion for integrase B7276 sequence
gatcgtatcgtctacgaaaaggcttctggaaccatgtatttcgactttttcgtctcctgattttttttccgaaagtccgcaaacccgcataaacactggatttttccgtatcatctggtacggaactccggtccaccgtactgactcatgataatttgggcgattttagggtttggtgtcgtgatgtttacaggatactcgaggcgtttttcataattccacatccgtcagcaccctcctttccggttgacttcccacgg

SEQ ID NO: 33276 - DNA, 260 bp, Unknown
  Description of Unknown: RightRegion for integrase B7277 sequence
aatttaattattaaaaaaattgaagttttttctttagataaaataaatataatattttaaaaaggtaaatcaacactacttttgatttacctttttaatttaaattttcaataaattttcttttctcttctagcaaaaactctttataacctatatattcttcatcagaaggattaatatatataataaagttacattctccaattaacctatctaaatgatactttatattttctatttctccattcttctcttttata

SEQ ID NO: 33277 - DNA, 260 bp, Unknown
  Description of Unknown: RightRegion for integrase B7278 sequence
ttgaaatgcatcgttttcgaccggaagaccgagcattttgattttcaatattatgcatgaaatagcggagaaccttgaaaaataaggctctccgcttattataggttattgcactttagaccgccgtactggctcattatatattgcgcgatcttcggattcggcgtcttgatattgactggatattgtaatcttttttcatatctccacatatgctacacctccccttcccacggccagcgctctgtaagccaggacca

SEQ ID NO: 33278 - DNA, 109 bp, Unknown
  Description of Unknown: RightRegion for integrase B7279 sequence
gatcgtatcgtctatgaaaaatcttctggaacgatgtattttgacttttttgtttcttgattttccatcccgaaaagctcgcaaacccgcataaatactggcttttctg

SEQ ID NO: 33279 - DNA, 139 bp, Unknown
  Description of Unknown: RightRegion for integrase B7280 sequence
ccaccaaagagagaacaggttgaagcgtttatgtctaatgtaggggaagtatctttgtagccttgcccgaattgtaccatcgtgaatccaagtccctccagattctgtgacatctgcactgcaccccaacggtcaaaag

SEQ ID NO: 33280 - DNA, 260 bp, Unknown
  Description of Unknown: RightRegion for integrase B7281 sequence
aatttaattataaaaaaaattgaagtttcttctttagataaaataaacataatattttaaaaaggactatatacatttagtaaatgtagtccttttttattaaataactttctagttttttctaaatttttaaacttctttttattcttaaaatgaggatgccatctataaaaatattttttcactttcctctatctcttttctataatattgaactaatgcatgagtttgaattctttttaaagaaactttttcgccca

SEQ ID NO: 33281 - DNA, 260 bp, Unknown
  Description of Unknown: RightRegion for integrase B7282 sequence
tttattacgcgaatccagcgtccagacggttactggatcgagatcgtaccggaaaagtgaacagcgcatcaaacacagaagccgcttcctgacttctgtgtttttttggtaaaccgattgacaaatacaggcacatacgttattctggagctggaagcgaaatggaatttgcacgttcttcagaaaggagcgaccgaatatgacgcgaagaaaacgactctgcctgctgctggcggtgctgacgctgctgctggcgctga

SEQ ID NO: 33282 - DNA, 260 bp, Unknown
  Description of Unknown: RightRegion for integrase B7283 sequence
atttcttatatcatctttgaccgcgcagcaaccaccttcaatatagttttccatttttaaggcgagacagccgctcccgcagctccgttgtctatagccttaaaaaattatatctaaaagcactaagctccgccgtactgcttttagatataataaatcgccgctttatgctttgctttttagtatagcacaaggcggcgattatttcaaatgttaaattctatccaggatgaacacggcgagatacagcagcacaagtc

SEQ ID NO: 33283 - DNA, 260 bp, Unknown
  Description of Unknown: RightRegion for integrase B7284 sequence
cgtaaggcaatccataatcaaagattagaagtattagagaaacaaatagaagacctctaatatgctattccagaaaaagaagaatatgaggagaagctaatacttgtgtcagatgctcttatggtgatccaagatgattacttagatgcagctactaaaaatgaatccctcaagcaaataatcagtagaattgaattcagtcgtgaaaatgatgtagaatttatattagacatagacctacaccaataaagtgtgggtta

SEQ ID NO: 33284 - DNA, 260 bp, Unknown
  Description of Unknown: RightRegion for integrase B7285 sequence
ccaccaaagagagaacaggttgaagcgtttatgtctaatgtaggggaagtatctttgtaaccctgaccgaactgaaccatcgtgaatccaagtccctccagattctgtgacatctgcaccgcaccccaacggtcaaaagcaatttctttgatatggaatttctgccccagttcatcgatgaagttttcgataaagccatagtggacaacattgccctccgttgttttcagataaccctgctgctcccacacatcataggg

SEQ ID NO: 33285 - DNA, 260 bp, Unknown
  Description of Unknown: RightRegion for integrase B7286 sequence
gatcgtatcgtctatgaaaaggcttccggaaccatgtatttcgactttttcgtctcctgattttttttcgaaagtccgcaaacccgcataaacactggatttttccgtatcatctggtacggaactccgggccaccgtactgactcatgataatttgggcgattttggggtttggtgtcgtgatgtttacaggatactcgaggcgtttttcataattccacatccgtcagcaccctcctttccggttgacttcccacggc

SEQ ID NO: 33286 - DNA, 260 bp, Unknown
  Description of Unknown: RightRegion for integrase B7287 sequence
ccaccaaagagagaacaggttgaagcatttatgtctaatgtaggggaagtatccttgtagccctgcccgaactgcacaagagtaaatccaagttcctccaaattctgcgacatctgcaccgcaccccatctatcaaaagcaatctctttgatgtggaatttctgtcccagttcatcaatgaagttttcgataaaaccatagtggacaacattgccctcagtagttttcagataaccttgccgttcccatacatcataggg

SEQ ID NO: 33287 - DNA, 260 bp, Unknown
  Description of Unknown: RightRegion for integrase B7288 sequence
gatcgtatcgtctatgaaaaatcttctggaacgatgtattttgacttttttgtttcttgattttccatcccgaaaagctcgcaaacccgcataaatactggcttttctggcttatcatctggtattgaactccggtccaccatactgactcatgataatttgggcgattttggggtttggtgtcgtgatgtttacaggatactcgaggcgtttttcataattccacatccgtcagcaccctcctttccggttgacttccc

SEQ ID NO: 33288 - DNA, 260 bp, Unknown
  Description of Unknown: RightRegion for integrase B7289 sequence
ttgaaatgcatcgttttcgaccggaagaccgagcattttgattttcaatattatgcatgattatgcatgaaatagcggagaaccttgaaaaataaggctctccgcttattataggttactgcactttagaccgccgtactggctcattatatattgcgcgatcttcggattcggcgtcttgatattgactggatattgtaatcttttttcatatctccacatatgctacacctccccttcccacggccagcgctctgtaa

SEQ ID NO: 33289 - DNA, 109 bp, Unknown
  Description of Unknown: RightRegion for integrase B7290 sequence
atttcttatatcatctttgaccgcgcagcaaccaccttcaatatagttttccatttttaaggcgagacagccgctcccgcagctccgttgtctatgccttaaaaaatta

SEQ ID NO: 33290 - DNA, 260 bp, Unknown
  Description of Unknown: RightRegion for integrase B7291 sequence
gatcgtatcgtctatgaaaaatcttctggaacgatgtattttgacttttttgtttcttgattttccatcccgaaaagcccgcaaacccgcataaatactggcttttctggcttatcatctggtattgaactccgggccaccgtactgactcatgataatttgggcgattttggggtttggtgtcgtgatgtttacaggatactcgaggcgtttttcataattccacatccgtcagcaccctcctttccggttgacttccc

SEQ ID NO: 33291 - DNA, 260 bp, Unknown
  Description of Unknown: RightRegion for integrase B7292 sequence
ccaccaaagagagaacaggttgaagcgtttatgtctaatgtaggggaagtatctttgtagccttgcccgaactgaaccattgtaaatccaagcccctccagattttgcgacatctgcactgcaccccagcggtcaaatgcaatttctttgatgtgaaatttctgccccagttcatcgatgaaattctcaataaagccatagtgaaccacatttccctcagtggttttcaagtagccttgccgttcccatatatcatatgg

SEQ ID NO: 33292 - DNA, 260 bp, Unknown; identical to SEQ ID NO: 33265
  Description of Unknown: RightRegion for integrase B7293 sequence

SEQ ID NO: 33293 - DNA, 260 bp, Unknown
  Description of Unknown: RightRegion for integrase B7294 sequence
ccaccaaagagagaacaggttgaagcatttatgtctaatgtaggggaagtgtctttgtagccttgcccgaactgaaccattgtaaatccaagcccctccagattttgcgacatctgcactgcaccccagcggtcaaatgcaatttctttgatgtgaaatttctgccccagttcatcgatgaaattctcaataaaaccatagtgaaccacatttccctcagtcgttttcaagtagccttgccgttcccatatatcatatgg

SEQ ID NO: 33294 - DNA, 260 bp, Unknown; identical to SEQ ID NO: 33270
  Description of Unknown: RightRegion for integrase B7295 sequence

SEQ ID NO: 33295 - DNA, 260 bp, Unknown
  Description of Unknown: RightRegion for integrase B7296 sequence
gatcgtatcgtctatgaaaaagcttccgggaccatgtatttcgactttttcgtttcctgatttttgttccgaaagcccgcaaacccgcataaacactggttttttcccttatcatctggtatggaactccgggccaccatactgactcatgataatttgggcgattttggggtttggtgtcgtgatgtttacaggatactcgaggcgtttttcataattccacatccgtcagcaccctcctttccggttgacttcccacg

SEQ ID NO: 33296 - DNA, 260 bp, Unknown
  Description of Unknown: RightRegion for integrase B7297 sequence
ctgaaatgcatcgttttcgaccgaaagaccgagcattttgattttcaatattatgcatgaaatagcggagaaccttgaaaaaataaggctctccgcttattataggttactgcactttagaccgccatactggctcattatatattgcgcgatcttcggattcggcgtcttgatattgactggatattgtaatcttttttcatatctccacatacgctacacctccccttcccacggccagcgctctgtaagccaggacc

SEQ ID NO: 33297 - DNA, 109 bp, Unknown; identical to SEQ ID NO: 33263
  Description of Unknown: RightRegion for integrase B7298 sequence

SEQ ID NO: 33298 - DNA, 260 bp, Unknown
  Description of Unknown: RightRegion for integrase B7299 sequence
gacggaatcacctatgataaggagaaaaaccggctgtattttaactttttcatttcatgaaaaatcgccggaaacccttataaaatggggcttcccggcgttttgtagggtattgcaatcggggccaccgtattgtgatgcaataatcttcgcgatccgtgcatccgtttttgtgatatttaccggatattgcaatcgtttttcatatatccacatacactaacacctgcctttcccggatctttcccatggccatggct

SEQ ID NO: 33299 - DNA, 109 bp, Unknown
  Description of Unknown: RightRegion for integrase B7300 sequence
gacggaatcacctatgataaggagaaaaaccggctgtattttaactttttcatttcataaaaaacgccggaaagccccattttataagggtttccggcgatttgtaggg

SEQ ID NO: 33300 - DNA, 260 bp, Unknown
  Description of Unknown: RightRegion for integrase B7301 sequence
gacggtatcacctatgataaggagaaaaaccggctgtattttaactttttcatttcatgaaaaaaacgccgggaagccctattttataagggtttccggcgatttgtagggtattgcaatccgggccaccgtattgtgatgcaataatcttcgcgatccctgcatccgtttttgtgatatttaccggatattgcaatcgtttttcatatatccacatacactaacacctgcctttcccggatctttcccatggccatggc

SEQ ID NO: 33301 - DNA, 260 bp, Unknown
  Description of Unknown: RightRegion for integrase B7302 sequence
ccaccaaagagagaacaggttgaagcatttatgtctaatgtaggggaagtgtccttgtagccctgcccgaactgcacaagagtaaatccaagttcctccaaattctgcgacatctgcaccgcaccccatctatcaaaagcaatctctttgatgtggaatttctgtcccagttcatcaatgaagttttcgataaaaccatagtggacaacattgccctcagtagttttcagataaccttgccgttcccatacatcataggg

SEQ ID NO: 33302 - DNA, 109 bp, Unknown
  Description of Unknown: RightRegion for integrase B7303 sequence
gatcgtatcgtctatgaaaaagcttccgggaccatgtatttcgactttttcgtttcctgatttttgttccgaaagtccgcaaacccgcataaacactggttttttccct

SEQ ID NO: 33303 - DNA, 109 bp, Unknown
  Description of Unknown: RightRegion for integrase B7304 sequence
atcagcaagatagtatatactaaatccaatgaagaaatcgagatgtactactatatgtagtacatctccttttactatacggcggacccgatggcgaattgggcgccag

SEQ ID NO: 33304 - DNA, 260 bp, Unknown
  Description of Unknown: RightRegion for integrase B7305 sequence
gatcgtatcgtctatgaaaaggcttccggaaccatgtatttcgactttttcgtctcctgatttttttccgaaagtccgcaaacccgcataaacactggatttttccgtatcatctggtacggaactccgggccaccgtactgactcatgataatttgggcgattttggggtttggtgtcgtgatgtttacaggatactcgaggcgtttttcataattccacatccgtcagcaccctcctttccggttgacttcccacggc

SEQ ID NO: 33305 - DNA, 260 bp, Unknown
  Description of Unknown: RightRegion for integrase B7306 sequence
gacgggattacctacgataaggagaaaaataggctgtattttaactttttcatttcatgaaaaaacgccgggaagccccattttataagggtttccggcgttttgtagggtattgcaatcggggccaccggagttcaatagcctatataggttttcttttaataggaagaaactctttcgatttcaagagtttttttaagagtttttagagatgatacaatatttttaccacttgtgatttgacatgtcaaggaatgtcg

SEQ ID NO: 33306 - DNA, 260 bp, Unknown; identical to SEQ ID NO: 33301
  Description of Unknown: RightRegion for integrase B7307 sequence

SEQ ID NO: 33307 - DNA, 227 bp, Unknown
  Description of Unknown: RightRegion for integrase B7308 sequence
gatcgtatcgtctatgaaaaggcttccgggacgatgtatttcgacttttttgtctcctgattttttgtttcaaaaaaaccgcaaacccgcataaacactgaggtttctggcatatcatctggtacggaactccgggccaccgtactgactcatgataatttgggcgattttagggtttggtgtcgtgatgtttacaggatactcgaggcgtttttcataattccaca

SEQ ID NO: 33308 - DNA, 260 bp, Unknown
  Description of Unknown: RightRegion for integrase B7309 sequence
gatcgtatcgtctatgaaaaagcttccgggaccatgtatttcgactttttcgtttcctgatttttgttccgaaagtccgcaaacccgcataaacactggttttttcccttatcatctggtatggaactccgggccaccggaatgcaataacagatgatatattgtaactgtaaatatttcgatgatacaatatgtttcccgggtaatttgcccgggattttttattgcatttcttctatatatatgttatcatagcacgt

SEQ ID NO: 33309 - DNA, 260 bp, Unknown
  Description of Unknown: RightRegion for integrase B7310 sequence
gatcgtatcgtctatgaaaaatcttctggaacgatgtattttgacttttttgtttcttgattttccatcccgaaaagctcgcaaacccgcataaatactggcttttctggcttatcatctggtattgaactccgggccaccatactgactcatgataatttgggcgattttggggtttggtgtcgtgatgtttacaggatactcgaggcgtttttcataattccacatccgtcagcaccctcctttccggttgacttccc

SEQ ID NO: 33310 - DNA, 260 bp, Unknown
  Description of Unknown: RightRegion for integrase B7311 sequence
ccaccaaagagagaacaggttgaagcatttatgtctaatgtaggggaagtatctttataaccctgtccaaattgcaccatcgtgaatccaagtccttccaaattctgtgacatctgcactgcaccccagcggtcaaatgcaatttctttgatgtgaaatttctgccccagttcatcgatgaaattctcaataaaaccatagtgaaccacatttccctcagtcgttttcaagtagccttgccgttcccatatatcatatgg

SEQ ID NO: 33311 - DNA, 109 bp, Unknown
  Description of Unknown: RightRegion for integrase B7312 sequence
gaacccgcccgacttgacgtcgaacgggttcttccagaagcttcatggctccccgggtaggattcgaacctacaaccctccggttaacagccggatgctctgccgttga

SEQ ID NO: 33312 - DNA, 260 bp, Unknown
  Description of Unknown: RightRegion for integrase B7313 sequence
gacggaatcacctacgataaggagaaaaaccggctgtattttaactttttcatttcatgaaaaaacgccgggaagccctattttataagggtttccggcgatttgtagggtattgcaatccggaccaccgtattgtgatgcaataatcttcgcgatccgtgcatccgtttttgtgatatttaccggatattgcaatcgtttttcatatatccacatacactaacacctgcctttcccggatctttcccatggccatggct

SEQ ID NO: 33313 - DNA, 260 bp, Unknown; identical to SEQ ID NO: 33266
  Description of Unknown: RightRegion for integrase B7314 sequence

SEQ ID NO: 33314 - DNA, 260 bp, Unknown; identical to SEQ ID NO: 33309
  Description of Unknown: RightRegion for integrase B7315 sequence

SEQ ID NO: 33315 - DNA, 260 bp, Unknown
  Description of Unknown: RightRegion for integrase B7316 sequence
gatcgtatcgtctatgaaaaagcttccgggaccatgtatttcgactttttcgtttcctgatttttgttccgaaagtccgtaaacccgcataaacactggattttttcgtatcatctggtacggaactccggtccaccgtactgactcatgataatttgggcgattttagggtttggtgtcgtgatgtttacaggatactcgaggcgtttttcataattccacatccgtcagcaccctcctttccggttgacttcccacgg

SEQ ID NO: 33316 - DNA, 260 bp, Unknown
  Description of Unknown: RightRegion for integrase B7317 sequence
atcagcaagatagtatatactaaatccaatgaagaaatcgagatgtactactatatgtagtacatctccttttactatacggcggacctaactgcaaaaagatatagcctcttgctttagcaagaggctatgctatcaattatgtataccgcaagtgagaacggcatacacaggtatcattatctccgtgatcattgtcataccacagaatataatatactgctccaaccatgtacccataaaggcgaattgttccagtg

SEQ ID NO: 33317 - DNA, 260 bp, Unknown
  Description of Unknown: RightRegion for integrase B7318 sequence
gatcgtatcgtctatgaaaaggcttccggaaccatgtatttcgactttttcgtctcctgattttttccgaaagtccgcaaacccgcataaacactggatttttccgtatcatctggtacggaactccgggccaccatactgactcatgataatttgggcgattttggggtttggtgtcgtgatgtttacaggatactcgaggcgtttttcataattccacatccgtcagcaccctcctttccggttgacttcccacggcc

SEQ ID NO: 33318 - DNA, 109 bp, Unknown
  Description of Unknown: RightRegion for integrase B7319 sequence
atttcttatatcatctttgaccgcgcagcaaccaccttcaatataattttccatttttaaggcgagacagccgctcccgcagctccgttgtctatgccttaaaaaatta

SEQ ID NO: 33319 - DNA, 260 bp, Unknown
  Description of Unknown: RightRegion for integrase B7320 sequence
tcttcccctaccgcatctgttaaaaaggtttatgacgttaagctggtcagatttttttagtttttatgtctacttaacacagacgaaatgctcctgattcaacagtctcaattcatcccgcaacaactcataggcgtcttgcggcgaacgaatcgtcggcatactcactttcggttcctcgacgtatcgaatcccgatcgtgaacgcggcgaggagttgctccgccttcttcttcgtcatcccttcgattttgcataaat

SEQ ID NO: 33320 - DNA, 99 bp, Unknown
  Description of Unknown: RightRegion for integrase B7321 sequence
gaacccgtccgacttgacatcgaacgggttcttccagaagcttcatggctccccgggtaggattcgaacctacaaccctccggttaacagccggatgct

SEQ ID NO: 33321 - DNA, 260 bp, Unknown
  Description of Unknown: RightRegion for integrase B7322 sequence
gacggaatcacctatgataaggagaaaaaccggctgtattttaactttttcatttcatgaaaaaacgccgggaagccccattttataagggttcccggcgttttgtagggtattgcaatcggggccaccgtattgtgatgcaataatcttcgcgatccgtgcatccgttttcgtgatatttaccggatattgcaatcgtttttcatatatccacatacactaacacctgcctttcccggatctttcccatggccatggct

SEQ ID NO: 33322 - DNA, 260 bp, Unknown
  Description of Unknown: RightRegion for integrase B7323 sequence
gacggaatcacctatgataaggagaaaaaccggctgtattttaactttttcatttcataaaaaacgccggaaagccccattttataagggtttccggcgatttgtagggtattgcaatcggggccaccgtattgtgatgcaataatcttcgcgatccctgcatccgtttttgtgatatttaccggatattgcaatcgtttttcatatatccacatacactaacacctgcctttcccggatctttcccatggccatggctg

SEQ ID NO: 33323 - DNA, 260 bp, Unknown
  Description of Unknown: RightRegion for integrase B7324 sequence
gatcgtatcgtctatgaaaaggcttccggaaccatgtatttcgactttttcgtttcctgatttttgttccgaaagtccgaaaacccgcataaacgctgggctttttggcgtatcatctggtattgatatccgggccaccatactgactcatgataatttgggcgattttggggtttggtgtcgtgatgtttacaggatactcgaggcgtttttcataattccacatccgtcagcaccctcctttccggttgacttcccac

SEQ ID NO: 33324 - DNA, 260 bp, Unknown
  Description of Unknown: RightRegion for integrase B7325 sequence
ccaccaaagagagaacaggttgaagcatttatgtctaatgtaggggaagtgtctttgtaaccctgaccgaactgaaccatcgtgaatccaagtccctccagattctgtgacatctgcactgcaccccaacggtcaaatgctatttctttgatgtgaaacttctgtcccagttcatcgatgaagttttcgataaaaccgtagtgaaccacattgccctcagtggttttcagatagccttgccgttcccaaatatcatatgg

SEQ ID NO: 33325 - DNA, 260 bp, Unknown
  Description of Unknown: RightRegion for integrase B7326 sequence
ccaagactccgttctcgtttgaggacggagttttgttctatattatccgctattcaatgatacgtccgctgcgagtgatcgcggcggactttttcttgcctgtcgggcggcgatatgctaacataggcctgataaatcgacacacaggagaaaagctatggtaaaacaaaatctgcattgccacacgacgtttgacgacggggcgagcacgcccgaggagatggtctgcgcggcaatggagcacgggctaagctcgctgg

SEQ ID NO: 33326 - DNA, 188 bp, Unknown
  Description of Unknown: RightRegion for integrase B7327 sequence
gatcgtatcgtctatgaaaaatcttctggaacgatgtattttgacttttttgtttcttgattttccatcccgaaaagctcgcaaacccgcataaatactggcttttctggcttatcatctggtattgaactccgggccaccggaatgcaccattatcgagtctcttgtacataaggagaaaaccatcg

SEQ ID NO: 33327 - DNA, 260 bp, Unknown
  Description of Unknown: RightRegion for integrase B7328 sequence
gatcgtatcgtctatgaaaaagcttccgggaccatgtatttcgactttttcgtttcttgatttttgttccgaaagcccgcaaacccgcataaacactggttttttcctttatcatctggtatggaactccgggccaccgtactgactcatgataatttgggcgattttagggtttggtgtcgtgatgtttacaggatactcgaggcgtttttcataattccacatccgtcagcaccctcctttccggttgacttcccacg

SEQ ID NO: 33328 - DNA, 260 bp, Unknown
  Description of Unknown: RightRegion for integrase B7329 sequence
gatcgtatcgtctatgaaaaagcttccggaacgatgtattttgacttttttgtctcctgattcttcctcccaaaaagcccgcaaagccacataaacactggattttccggcatatcatctggtacggaactccgggccaccatactgactcatgataatttgggcgattttggggtttggtgtcgtgatgtttacaggatactcgaggcgtttttcataattccacatccgtcagcaccctcctttccggttgacttccc

SEQ ID NO: 33329 - DNA, 260 bp, Unknown
  Description of Unknown: RightRegion for integrase B7330 sequence
gatcgtatcgtctatgaaaaagcttccgggaccatgtatttcgactttttcgtttcctgatttttgttccgaaagcccgcaaacccgcataaacactggttttttcccttatcatctggtatggaactccgggccaccgtactgactcatgataatttgggcgattttagggtttggtgtcgtgatgtttacaggatactcgaggcgtttttcataattccacatccgtcagcaccctcctttccggttgacttcccacg

SEQ ID NO: 33330 - DNA, 260 bp, Unknown
  Description of Unknown: RightRegion for integrase B7331 sequence
gatcgtatcgtctatgaaaaggcttccggaaccatgtatttcgactttttcgtctcctgatttttttccgaaagtccgcaaacccgcataaacactggatttttccgtatcatctggtacggaactccgggccaccatactgactcatgataatttgggcgattttggggtttggtgtcgtaatgtttacaggatactcgaggcgtttttcataattccacatccgtcagcaccctcctttccggttgacttcccacggc

SEQ ID NO: 33331 - DNA, 141 bp, Unknown
  Description of Unknown: RightRegion for integrase B7332 sequence
gatcgtatcgtctatgaaaaagcttccggaacgatgtattttgacttttttgtctcctgattcttcctcccaaaaagcccgcaaagccgcataaacactggattttccggcatatcatctggtacggaactccgggccacc

SEQ ID NO: 33332 - DNA, 260 bp, Unknown
  Description of Unknown: RightRegion for integrase B7333 sequence
ctgaaatgcattgttttcgaccggaagaccgagcattttgattttcaatattatgcatgaaatagcggagaaccttgaaaaataaggctctccgcttattataggttactgcactttagaccgccatactggctcattacatattgcgcgatcttcggattcggcgtcttgatattgactggatattgtaatcttttttcatatctccacatacgctacacctccccttcccacggccagcgctctgtaagccaggacca

SEQ ID NO: 33333 - DNA, 260 bp, Unknown
  Description of Unknown: RightRegion for integrase B7334 sequence
gacgggattacctatgataaggagaaaaataggctgtattttaactttttcatttcatgaaaaaacgccgggaagccccattttataagggtttccggcgatttgtagggtattgcaatccgggccaccggagttcaatagcctatataggttttcttttaataggaagaaactctttcgatttcaagagtttttttaagagtttttagagatgatacaatatttttaccacttgtgatttgacatgtcaaggaatgtcg

SEQ ID NO: 33334 - DNA, 109 bp, Unknown
  Description of Unknown: RightRegion for integrase B7335 sequence
gatcgtatcgtctatgaaaaagcttccgggaccatgtatttcgactttttcgtttcctgatttttgttccgaaagcccgcaaacccgcataaacactggttttttccct

SEQ ID NO: 33335 - DNA, 260 bp, Unknown
  Description of Unknown: RightRegion for integrase B7336 sequence
ttgaaatgcatcgttttcgaccggaagaccgagcattttgattttcaatattatgcatgaaatagcggagaaccttgaaaaataaggctctccgcttattataggttactgcactttagaccgccatactggctcattatatattgcgcgatcttcggattcggcgtcttgatattgactggatattgtaatcttttttcatatctccacatacgctacacctccccttcccacggccagcgctctgtaagccaggacca

SEQ ID NO: 33336 - DNA, 260 bp, Unknown
  Description of Unknown: RightRegion for integrase B7337 sequence
atcagcaagatagtatatactaaatccaatgaagaaatcgagatgtactactatatgtagtacatctccttttactatacggcggacccgatggcgaattgggcgccagcctgcgctacctttcgcaaaaattttccatgcccaaccgccgggtcgccggtctcctcaatgatattggcaccgaggagctggctcatctggagatgatcggcaccatcgtccaccagctcaccaggaatctctccatcgaagagatcaaa

SEQ ID NO: 33337 - DNA, 109 bp, Unknown
  Description of Unknown: RightRegion for integrase B7338 sequence
gatcgtatcgtctatgaaaaagcttctgggaccatgtatttcgactttttcgtttcctgattcttcctttaaaaaatcccgcaaagccgcataaacactggattttctg

SEQ ID NO: 33338 - DNA, 260 bp, Unknown
  Description of Unknown: RightRegion for integrase B7339 sequence
ctgtcgaaaatcgtctatgacaaagcatttcagcgcctggtcctctatttttatgcctgattttcttagcttattcttatcatcggttttcgccgtttagtcctccacacggaaaaaaccgataacacgtctaacgcttcatttacatgcaacatatcatcccctcatgcaaaagtcaaggacagcgcgtttgcgctgtcctttttctcattttgcgtttaattcgttgtagactttttgacctattgccacgctgtaag

SEQ ID NO: 33339 - DNA, 260 bp, Unknown
  Description of Unknown: RightRegion for integrase B7340 sequence
attgccaaaatcgtgtatgaaaaatcaaaaaaaagacttgtttttttctttcacacataaagttatattcctttactgtctggcggtccggacggcgagttgggagcttcgctgagatatctcagccagcgttttgctatgccatatcccgagcttaaaggattgctgacggatattggcacagaggagctcggtcaccttgaaatgatcggagcgatcgtccaccagcttacaaggaacctttcgtatgacgagatcaa

SEQ ID NO: 33340 - DNA, 260 bp, Unknown
  Description of Unknown: RightRegion for integrase B7341 sequence
tcagtcataaatgaaattgttgtcacaaaagaagaaatgacgataacgctagacttctaagggtttagcgttatttttgtattttggtcaaagcgataatgattagttagagcaaaatacacaaaaaattattttcacagtcatgcactttccctttccatctcatacatccgcaccgagtgcagcacgagttcccgatacttccaagttgataccagatactcaatgacttcctggtcctctatcttacattccatcaa

SEQ ID NO: 33341 - DNA, 260 bp, Unknown
  Description of Unknown: RightRegion for integrase B7342 sequence
gtcgatcagattgtatttgacaaagaggctgaaatggtgtattttgatattatcatctaagacacatcaatttttcactggttacgattgtactatttcttaattcagatttaacttttttccaaaaaacaagtgaattttatctattatagggtatcggactccggtggcccggatggagaaatcggtgcttctatgcgctatctctcccagcgctttaccatgccgaaccgaacctctgcagctgtgcttaatgatat

SEQ ID NO: 33342 - DNA, 260 bp, Unknown
  Description of Unknown: RightRegion for integrase B7343 sequence
tttgaaattactttgaaattatcagatatggaaataaaagaaacagttgaatttgaataaaaaagaagcctttctttcgggaaaaagaaaggcttcataagtcggattgtcagatatttttggaaaacggcaatctgataatttctctataatcaatataatcattttacttttttctgtcaataaactactgcaacaatcttgaatgattatatttcacatccttaactttcgttattgcatattctgttgttgtgctt

SEQ ID NO: 33343 - DNA, 260 bp, Unknown
  Description of Unknown: RightRegion for integrase B7344 sequence
gaagacattgtctatgacaagaaaaacgggaagatgatttttactctttacatctcgtaagtcttaaaaataaaggctttgcgagatgttataggttattgcattttcgtcctccgaattgttaaaacatataatatagaagaaaccgctcctcatctctccgggttacgttgaataaggaacggtctcttttgtatctttggttacaatatattccatgtgtgtaattttgtcaaattattttaaatttgctattgact

SEQ ID NO: 33344 - DNA, 260 bp, Unknown
  Description of Unknown: RightRegion for integrase B7345 sequence
attgccaaaatcgtgtacgaaaaatcaaagaaaagacttgtttttttctttcacacataaagttatattcctttactatctggcggtccggacggagagctcggtgcctcactgagatatctcagccagcgtttttcaatgccatatcccgaacttaagggacttctgacggatataggtacagaggaattgggacatcttgaaatgatcggagcgatcgttcatcagctgacgagaaatctttcgtatgatgaaatcaa

SEQ ID NO: 33345 - DNA, 260 bp, Unknown
  Description of Unknown: RightRegion for integrase B7346 sequence
gttgaaaaagtaatatattccaagcctgaagagtcagtgaaaatatttttttatctgtaatcatacgcatttgacatatggaggtccgcatggtaaatgcgtatgaaaaaagcagggttaattgccctgcttacttatgccaattttatacttttcttttaagcaattcagttttgaattgtgctcaaccttagtgtcattttgtagccttcctacaactattcccggaggcctatctatttctttcgcaaaggttttaa

SEQ ID NO: 33346 - DNA, 260 bp, Unknown
  Description of Unknown: RightRegion for integrase B7347 sequence
aaaattgtatttgaccgtgaaaacaagctgattgacatttattattatacttctgtatagcttagaaatggcttatttatgcgatttattaaagttcatatgtacttgctaaaaggatgacgcagtggggttctaaatacttaggcgatcagggatatgctccgattgaaatcctgagatattattatggagagagtatgtacatcaataccgcagaacagatttcaggaattccttcttcctggccgggatatgatctg

SEQ ID NO: 33347 - DNA, 109 bp, Unknown
  Description of Unknown: RightRegion for integrase B7348 sequence
gtcgatcagattgtatttgacaaagaggctgaaatggtgtattttgatattatcatctaagacacatcaatttttcactggttacgattgtactatttcttaattcaaa

SEQ ID NO: 33348 - DNA, 260 bp, Unknown; identical to SEQ ID NO: 33343
  Description of Unknown: RightRegion for integrase B7349 sequence

SEQ ID NO: 33349 - DNA, 260 bp, Unknown
  Description of Unknown: RightRegion for integrase B7350 sequence
attgataaaattgtttacgataaaaagaaaaatcagctgcaaattttttattttgcttaactgtatcgcttaaagcaatacggcggcccggactgatttaagtgataataaaataaaggcataccctccggcctgcctcacaattatcctgcgccattttgtattaaacgcagcgctattatcgctttaatatatgtattatatttataaaaaacataaataaccaacataaaaaatgtacatatttaacaaaaatatgg

SEQ ID NO: 33350 - DNA, 260 bp, Unknown
  Description of Unknown: RightRegion for integrase B7351 sequence
gtcgatcagattgtatttgacaaagaggctgaaatggtgtattttgatattatcatctaagacatatcaatttttcacaggttacgattgtactatttcttaattcagatttaacttttttccaaaaaacaagtgaattttatctattatagggtatcggactccggtggcccggatggagaaatcggtgcttctatgcgctatctctcccagcgctttaccatgccgaaccgaacctctgcagctgtgcttaatgatat

SEQ ID NO: 33351 - DNA, 260 bp, Unknown
  Description of Unknown: RightRegion for integrase B7352 sequence
attgccaaaatcgtgtacgaaaaatcaaagaaaagacttgtttttttctttcacacataaagttatattcctttactgtctggcggtccggacggcgagttgggagcttcgctgagatatctcagccagcgttttgctatgccttatcccgagcttaaaggattgctgacggatattggcacagaggagctcggtcaccttgaaatgatcggagcgatcgtccaccagctgacaaggaacctttcgtatgacgagatcaa

SEQ ID NO: 33352 - DNA, 109 bp, Unknown
  Description of Unknown: RightRegion for integrase B7353 sequence
attgccaaaattgtgtatgaaaaatcaaagaaaagacttgtttttttctttcacacataaagttatattcctttactgtacggcggtccggacggcgagttgggagctt

SEQ ID NO: 33353 - DNA, 260 bp, Unknown
  Description of Unknown: RightRegion for integrase B7354 sequence
caattagttagttctattgatgtcacaaacgaaaatgtaacgattaactgggatttctagttaactgttatttttttgaatagatttagagagtgtaatttcaataacgttctctaaaactattaaaaaataattttctacattaaattaggattgtaaaatacaaaataacccgacacctcaaatgaagtgccgggttattttgtaccactcaaaaatcagtatagcatacttttatcggtgcaatttaacgttgcttt

SEQ ID NO: 33354 - DNA, 260 bp, Unknown
  Description of Unknown: RightRegion for integrase B7355 sequence
ttgaaatgcatcgttttcgaccgaaagaccgagcattttgattttcaatattatgcatgattatgcatgaaatagcggagaaccttgaaaaataaggctctccgcttattataggttactgcactttagaccgccatactggctcattatatattgcgcgatcttcggattcggcgtcttgatattgactggatattgtaatcttttttcatatctccacatacgctacacctccccttcccacggccagcgctctgtaa

SEQ ID NO: 33355 - DNA, 260 bp, Unknown
  Description of Unknown: RightRegion for integrase B7356 sequence
gaagatattgtctatgacaagaaaaacgggaagatgatttttaccctttacatctcgtaagccttaaaaataaaggctttgcgagatgttataggttattgcattttcgtcctccgaattgttaaaacctataatatatagaagaaactccgaatgatacaataaaagaaaccgctcctcatttctctggggtgaggtgcggtctctttgtttatttctacttataatatagcatcgtctatttgatgtgtcaataagtt

SEQ ID NO: 33356 - DNA, 109 bp, Unknown
  Description of Unknown: RightRegion for integrase B7357 sequence
attgccaaaatcgtgtacgaaaaatcaaagaaaagacttgtttttttctttcacacataaagttatattcctttactgtacggcggtccggacggcgagttgggagctt

SEQ ID NO: 33357 - DNA, 109 bp, Unknown
  Description of Unknown: RightRegion for integrase B7358 sequence
attgccaaaatcgtgtacgaaaaatcaaaaaaaagacttgtttttttctttcacacataaagttatattcctttactgtacggcggtccggacggcgagttgggagctt

SEQ ID NO: 33358 - DNA, 260 bp, Unknown
  Description of Unknown: RightRegion for integrase B7359 sequence
attgccaaaatcgtgtacgaaaaatcaaagaaaagacttgtttttttctttcacacataaagttatattcctttactgtctggcggtccggatggagagctcggtgcctcactgagatatctcagccagcgtttttcaatgccctatcccgaacttaagggcttgctgacagatataggaacagaagaattgggacatcttgagatgatcggagcgattgttcatcagctgacgagaaatctttcgtatgatgaaatcaa

SEQ ID NO: 33359 - DNA, 109 bp, Unknown
  Description of Unknown: RightRegion for integrase B7360 sequence
atcgccaaaatcgtgtacgaaaaatcaaagaaaagacttgtctttttctttcacacataaagttatattcctttactgtacggcggtccggacggtgagttgggagctt

SEQ ID NO: 33360 - DNA, 260 bp, Unknown
  Description of Unknown: RightRegion for integrase B7361 sequence
gttgaaaaggtaatatattccaagcctgaagagtcggttaaaatattcttttatttataattttctatattcaccacataaaagagtggcggaaatgcccctcttttattgacattatagtgcaaaatagatataatgcaactataaagtagttgcaaacaagggaaagcaaaatgagcaaatttgaaaaggcaaaagaaagaataaggtcaaagccaaaagattatacttatgatgaagcaaggtatttgctatcccag

SEQ ID NO: 33361 - DNA, 260 bp, Unknown
  Description of Unknown: RightRegion for integrase B7362 sequence
gtcgatcagattgtatttgacaaagaggctgaaatagtgtattttgatattatcatctaagacacatcaatttttcactggttacgattgtactatttcttaattcagatttaacttttttccaaaaaacaagtgaattttatctattatagggtatcggactccggtggcccggatggagaaatcggtgcttctatgcgctatctctcccagcgctttaccatgccgaaccgaacctctgcagctgtgcttaatgatat

SEQ ID NO: 33362 - DNA, 109 bp, Unknown
  Description of Unknown: RightRegion for integrase B7363 sequence
atcgccaaaatcgtgtacgaaaaatcaaaaaaaagacttgtttttttctttcacacataaagttatattcctttactgtacggcggtccggacggcgagttgggagctt

SEQ ID NO: 33363 - DNA, 260 bp, Unknown
  Description of Unknown: RightRegion for integrase B7364 sequence
ttgaaatgcatcgttttcgaccggaagaccgagcattttgattttcaatattatgcatgaaatagcggagaaccttgaaaaaataaggctctccgcttattataggttactgcactttagaccgccatactggctcattatatattgcgcgatcttcggattcggcgtcttgatattgactggatattgtaatcttttttcatatctccacatacgctacacctccccttcccacggccagcgctctgtaagccaggacc

SEQ ID NO: 33364 - DNA, 260 bp, Unknown
  Description of Unknown: RightRegion for integrase B7365 sequence
attgccaaaatcgtgtacgaaaaatcaaagaaaagacttgtttttttctttcacacataaagttatattcctttactgtacggcggtccggacggcgagttgggagcttcgctgagatatctcagtcagcgttttgctatgccctatcccgagcttaaaggattgctgacggatattggcacagaggagctcgggcaccttgaaatgatcggagcgatcgtccaccagctgacaaggaacctttcgtatgacgagatcaa

SEQ ID NO: 33365 - DNA, 260 bp, Unknown
  Description of Unknown: RightRegion for integrase B7366 sequence
tctgtcataaatgagattgttgtaaccaaagaagaaatgacgataacgctagacttttaagggtttagcgctatttttgtattttagtcaaattgataatgataactttattatacatattttcttcctcctacttatctattcgcaaggaatcaaaaaaagttacagaaatttgtaacttttcgagaaaattttttattttttatgaaccatgaaacctgtcgcctgttgattggccataatggtcatatctgtaatct

SEQ ID NO: 33366 - DNA, 260 bp, Unknown
  Description of Unknown: RightRegion for integrase B7367 sequence
gtcgatcagattgtatttgacaaagaggctgaaatggtgtattttgatattatcatctaagacatatcaatttttcacaggttacgattgtactatttcttaattcagatttaacttttttccaaaaaacaagtgaattttatctattatagggtatcggactccggtggcccggatggagaaatcggtgcttctatgcgctatctctcccagcgctttaccatgccaaaccgaacctctgcagctgtgcttaatgatat

SEQ ID NO: 33367 - DNA, 260 bp, Unknown
  Description of Unknown: RightRegion for integrase B7368 sequence
caaggcgataaagtcaaaatcacattcaaaccaacttttcgaaaaatccgtaaaagataattagtcataaattccttatttttgaatgtacccgcacattttcatgtgtgggttttcttttgcttattatttaaaaatagcaataaaagataaaattaatgctaaaaatgcaattacatttgaaattatatttgcccaaggaattgatttatttaaaccaacaaaatcagttaatctttcagcaacacattgtaagtcta

SEQ ID NO: 33368 - DNA, 260 bp, Unknown
  Description of Unknown: RightRegion for integrase B7369 sequence
atgctcatcgatcacatcaacgtaagtaatactgatttggatatttactggcaaatctaatggccgctttcaaaggcggcttttttcttgcccaaaacaaaaagatttagagagtgccatttccaccagggtaaagcccttggccacccgttttttcaatttctttaacattattccaccacctgtaatgattgatagattggcatcaggatacttaaatacatcaccacaaccacagcagctatcatcaccagaatcag

SEQ ID NO: 33369 - DNA, 260 bp, Unknown
  Description of Unknown: RightRegion for integrase B7370 sequence
atcgccaaaatcgtgtacgaaaaatcaaaaaaaagacttgtttttttctttcacgcataaagttatattcctttactgtctggcggtccggacggcgagttgggagcttcgctgagatatctcagccaacgttttgctatgccttatcccgagcttaaaggattgctgacggatattggcacagaggagctcgggcaccttgaaatgatcggagcgatcgtccaccagctgacaaggaacctttcgtatgacgagatcaa

SEQ ID NO: 33370 - DNA, 260 bp, Unknown
  Description of Unknown: RightRegion for integrase B7371 sequence
gaagacattgtctatgataaacaaaatgaccgtctccttttccacttctattgctcatagagccgcataaacagcggctctatattagttatatgtttttgcactctggcggaccagacggcgaacttaatgcttctcttcgttatctttctcagagatttactatgccgaaccgaaaagcgatgggtgtattaaatgatataggtacagaggcaactgtaatattctcaccatcgactgatgctttttttgacgctttt

SEQ ID NO: 33371 - DNA, 109 bp, Unknown
  Description of Unknown: RightRegion for integrase B7372 sequence
gtcgatcagattgtatttgacaaagaggctgaaatggtgtattttgatattatcatctaagacatatcaatttttcacaggttacgattgtactatttcttaattcaga

SEQ ID NO: 33372 - DNA, 260 bp, Unknown
  Description of Unknown: RightRegion for integrase B7373 sequence
gtaatcgaccgcgtgatctatgtcaaatcctccggtgagcttgcagtatactacagatagacaaaataaccccacacatacacaatgtgtggggttatctctttttgcaatacggcgggctgtattgcttttagatataatagtcaggtcatgcaatgctgtattgtgacagcatcattttgatcttggccgcccgctctatcattctctcgtgcataaagtcatacacggtcttcattccctccggaatactctttccg

SEQ ID NO: 33373 - DNA, 260 bp, Unknown
  Description of Unknown: RightRegion for integrase B7374 sequence
ttaatcaacagaattgaagtagatgatgatgatatttatatctattggaacttcgtctgatttttattttgcccatttcggcatatcattcaacctcggttaatactgctaaagttactttaaagaaatacttcaaatcaaccgaataaaaacctctgttaaacggcacagcctcaatatccgtaaacacccaaatcacttcggcttttgtgcatttaacgtttattgctctgtccacaatatcctgaccgcacgaagtc

SEQ ID NO: 33374 - DNA, 260 bp, Unknown
  Description of Unknown: RightRegion for integrase B7375 sequence
ttaatcaacagaattgaagtagatgatgatgatatttatatctattggaacttcgtctgatttttattttgcccatttcggcatatcattcaacctcggttaatactgctaaggtaactttaaagaaatacttcaaatcaaccgaataaaaacctctgttaaacggcacagcctcaatgtccgtaaacacccaaatcacttcggcttttgtgcatttaacgtttattgctctgtccacaatatcctgaccgcacgaagtc

SEQ ID NO: 33375 - DNA, 109 bp, Unknown
  Description of Unknown: RightRegion for integrase B7376 sequence
gtccgccagattgtttatgcaaagaaaacacaatcgattgaaattttataccaggtctaatttgcttattatctccttttacaattaagaccgccaagctgacttatta

SEQ ID NO: 33376 - DNA, 109 bp, Unknown
  Description of Unknown: RightRegion for integrase B7377 sequence
gatcaaatcgtctgggataaagaaaataacaagatgtattttgatattattgtacattgattttttatctgctattgcactccggtccgccatactggctggatataaa

SEQ ID NO: 33377 - DNA, 260 bp, Unknown
  Description of Unknown: RightRegion for integrase B7378 sequence
aaattaattagtggtatcaaggtatttaacgataaggtagagataaactggaacatttaagcctaatatttttaggctttttaaaaaagtttagagaacatcattgaaatgacgattgctttgttcatccaaagcaaaaaggcatgcagatcatatccacacaccttttaaactattctttattttttaccaatttatattgtgcaactaatgctttggcatttccgccatggccgaattctctgaactcattgtcactt

SEQ ID NO: 33378 - DNA, 260 bp, Unknown
  Description of Unknown: RightRegion for integrase B7379 sequence
aacttgattagtggtatcaaggtatttaacgataaggtagaaataaattggaacatttaagcctaatatttttaggcttttttaaaaaaatttaaagaacgtcatttctattaaagtaaatccacgccttttctttttcactaatataagcctcctagagttttgtatattggtaaaagaattgttaaataagttccaacaataattatcgctatcacgataaatagtatcggttgaactaactcaatcaatttatcaat

SEQ ID NO: 33379 - DNA, 260 bp, Unknown
  Description of Unknown: RightRegion for integrase B7380 sequence
ttaatcaacagaattgaagtagatgatgatgatatttatatctattggaacttcgtctgatttttattttgcccatttcggcatatcattcaacctcggttaatactgctaaggtaactttaaagaaatacttcaaatcaaccgaataaaaacctctgttaaacggcacagcctcaatgtccgtaaacacccaaatcacttcggcttttgtgcatttaacgtttattgctctgtccacaatatcctgaccgcatgaagtc

SEQ ID NO: 33380 - DNA, 260 bp, Unknown
  Description of Unknown: RightRegion for integrase B7381 sequence
gtccgccagattgtttatgcaaagaaaacacaatcgattgaaattttataccaggtctaattcgcttattatctccttttacaatttagaccgccaaatttcaaaaggatataatacaaaataaatcaaaatattccgtctgtacaaaaaaatgttcattacaatatttacatatggacattaatcgacacccttgatataatttatatatatctaaaggaggtcgatattttgagaattgcggtatgcgatgatcagga

SEQ ID NO: 33381 - DNA, 88 bp, Unknown
  Description of Unknown: RightRegion for integrase B7382 sequence
gatcaaatcgtctgggataaagaaaataacaagatgtattttgatattattgtacattgattttttatctgctattgcactccggtcc

SEQ ID NO: 33382 - DNA, 260 bp, Unknown
  Description of Unknown: RightRegion for integrase B7383 sequence
aaattaattagtggtatcaaggtatttaacgataaggtagagataaactggaatatttaagcctaatattttttaggctttttaaaaaagtttagagaacatcattgaaattacgattgttttgttcatccaaaacaaaaagcatgcagattatatccacacaccttttaaactattctttatttcttaccaatttatattgtgcaactaatgcttgggcatttccgccatggccgaattctctgaactcattgtcactt

SEQ ID NO: 33383 - DNA, 260 bp, Unknown
  Description of Unknown: RightRegion for integrase B7384 sequence
ttaatcaacagaattgaagtagatgatgatgatatttatatctattggaacttcgtctgatttttattttgcccatttcggcatatcattcaacctcggttaatactgctaaagttactttaaagaaatacttcaaatcaaccgaataaaaacctctgttaaacggcacagcctcaatgtccgtaaacacccaaatcacttcggcttttgtgcatttaacgtttattgctctgtccacaatatcctgaccgcacgaagtc

SEQ ID NO: 33384 - DNA, 260 bp, Unknown
  Description of Unknown: RightRegion for integrase B7385 sequence
ttaatcaacagaattgaagtagatgatgatgatatttatatctattggaacttcgtctgatttttattttacccatttcggcacatcattcaacctcggttaatactgccaaagttactttaaagaaatacttcaaatcaaccgaataaaaacctctgttaaacggcacagcctcaatgtccgtaaacacccaaatcacttcggctcttgtgcatttaacgtttattgctctgtccacaatatcctgaccgcacgaagtc

SEQ ID NO: 33385 - DNA, 260 bp, Unknown; identical to SEQ ID NO: 33373
  Description of Unknown: RightRegion for integrase B7386 sequence

SEQ ID NO: 33386 - DNA, 260 bp, Unknown
  Description of Unknown: RightRegion for integrase B7387 sequence
caccgacaggatcgggaacacagtcattttgaaataatttacagagacccgtttgcataaagactatcctattttattattaggaagtcctaataataaaataggatagtaaattcagttgagaaaacgtgccagccaaaaagcaagtcaaaaatttggttattttgtaggatgaaaaattcccatcagtgtgttaaaatttaaggagaaggaggtgggcgaaatggtatgtccaaaatgcggaagtgaaaatgtccagg

SEQ ID NO: 33387 - DNA, 260 bp, Unknown
  Description of Unknown: RightRegion for integrase B7388 sequence
gaggaaatttttgcaaaaaaaatagccactacgcaaaacaagcgattgaattgcttgtaaaacgtgtgacaatcattgataagactattaccttgagcttaacaacagaaggttgtctgagcttattggtgccgcggaaccgtgacggtatgagcgtatatacttttactattgctataaatttggcagcttaattactatactaaaaggcaggattcgctcctgccttttctgtttcccttgttaattttttatcgcta

SEQ ID NO: 33388 - DNA, 260 bp, Unknown
  Description of Unknown: RightRegion for integrase B7389 sequence
tcaattccaaaatacaggctcgtggatcattacggcagaaagaaaacctcaggcaactaaaacctgaggcatttttatttagaataatctttgttgaaatatgaactctttttttactgagtcatcgattgtagtccacactcttcctgtttttgcaatcttaataggtctagctagttttcttggattaacgaaatcataagcataaaagactgaatcatcatcttcaatctggaataccatgcctgcccactttccag

SEQ ID NO: 33389 - DNA, 260 bp, Unknown
  Description of Unknown: RightRegion for integrase B7390 sequence
aaattaattagtgatatcaaggtatttaacgataaagtagaaataaactggaacatttaagcctaatattttttaggctttttaaaaaagtttagagaacatcattgaaatggctatcgtcttttttgtccaaaataaaaaggcatgcagatcatatccacacaccttttaaactattctttattttttaccaatttatattgtgcaactaatgctttggcatttccgccatggccgaattctctgaactcattgtcact

SEQ ID NO: 33390 - DNA, 260 bp, Unknown; identical to SEQ ID NO: 33380
  Description of Unknown: RightRegion for integrase B7391 sequence

SEQ ID NO: 33391 - DNA, 260 bp, Unknown
  Description of Unknown: RightRegion for integrase B7392 sequence
aaattaattagtggtatcaaggtatttaacgataaggtagagataaactggaatatttaagcctaatattttttaggctttttaaaaaagtttagagaacatcattgaaacgacatgttctaaatttttttgtgatataatattattgaaagctcaagtttagcaaatcctaagtgtaggagttaaactaacagagtcctaattactgtaattagggcttgttttttttatatctaaaattaaaaaagcttattttttaa

SEQ ID NO: 33392 - DNA, 109 bp, Unknown
  Description of Unknown: RightRegion for integrase B7393 sequence
gatcaaatcgtctgggataaagaaaacaacaagatgtattttgatattattgtacattgattttttatctgctattgcactccggcccgccatactggctggatataaa

SEQ ID NO: 33393 - DNA, 260 bp, Unknown
  Description of Unknown: RightRegion for integrase B7394 sequence
ttaatcaacagaattgaagtagatgatgatgatatttatatctattggaacttcgtctgatttttattttgcccatttcggcatataattcaacctcggttaatactgctaaggtaactttaaagaaatacttcaaatcaaccgaataaaaacctctgttaaacggcacagcctcaatatccgtaaacacccaaatcacttcggcttttgtgcatttaacgtttattgctctgtccacaatatcctgaccgcacgaagtc

SEQ ID NO: 33394 - DNA, 260 bp, Unknown
  Description of Unknown: RightRegion for integrase B7395 sequence
aaattaattagtggtatcaaggtatttaacgataaagtagaaataaactggaacatttaagcctaatattttttaggctttttaaaaaagtttagagaacatcattgaaatggctatcgtcttttttgtccaaaataaaaaggcatgcagatcatatccacacaccttttaaactattctttattttttaccaatttatattgtgcaactaatgctttggcatttccgccatggccgaattctctgaactcattgtcact

SEQ ID NO: 33395 - DNA, 260 bp, Unknown
  Description of Unknown: RightRegion for integrase B7396 sequence
attcgagagctacaaaacaccaaaagtccagaaccagtagaaatattaaagaacagttagaaaagtttaagggcgttactccaaaagacattaacaggcagattgttaatgaactttttgagaagattaccgttgaaccgttggcggttacatgtgcaacactgacatttcaattgaggtctggaagccttgaaaaatgggggtttcccttgcgccgttctgacgatatgattttaactctacattcagaacaacacaag

SEQ ID NO: 33396 - DNA, 260 bp, Unknown
  Description of Unknown: RightRegion for integrase B7397 sequence
gaggaaatttttgcaaaaaaaatagccactacgcaaaacaagcgattgaattgcttgtaaaacgtgtgacaatcattgataagactattaccttgagcttaacaacagaaggttgtctgagcttattggtgccgcggactcgaaattatattgaccgcaatatagtgattaaccgattgtactctcttgcttcctagtttatgctataattatgtagttgtaacaacataatatcagaaacaaggcccggtgtctagccg

SEQ ID NO: 33397 - DNA, 260 bp, Unknown
  Description of Unknown: RightRegion for integrase B7398 sequence
ttaatcatccggagaattactattggaaataccgataataaaatatatattacattttaaaggcgagacttcaacatctcgccttttgttatgctattagtaataaagctagccccatcaatacaaatggaactataaatatgaaaagccatcttttttctttaaattctttggtttcattaaaatacctaatggaagcaaatagtaataaaatcaatgcagatatagaaataattgctacagaatttactaaaaggaat

SEQ ID NO: 33398 - DNA, 260 bp, Unknown
  Description of Unknown: RightRegion for integrase B7399 sequence
aaattaattagtggtatcaaggtatttaacgataaagtagaaataaactggaacatttaagcctaatatttttaggttttttaaaaaagtttagaacatgtcattgaaatggctatcgtcttttttgtccaaaataaaaaggcatgcagatcagatccacacaccttttaaactattctttattttttaccaatttatattgtgcaactaatgcttgggcatttccgccatggccgaattctctgaactcattgtcactt

SEQ ID NO: 33399 - DNA, 109 bp, Unknown
  Description of Unknown: RightRegion for integrase B7400 sequence
ctgaaatgcatcgttttcgaccggaagaccgagcattttgattttcaatattatgcatgattatgcatgaaatagcggagaaccttgaaaaataaggctctccgcttat

SEQ ID NO: 33400 - DNA, 140 bp, Unknown
  Description of Unknown: RightRegion for integrase B7401 sequence
ttcagctttgacaattgggacgatgactttatgccgacaaaaaagacgaaccccagataaaccagggttcatctaattcaactcgggtggagcagaagctacttactgcgaacactatatatgtcaactcagttgaaatc

SEQ ID NO: 33401 - DNA, 260 bp, Unknown
  Description of Unknown: RightRegion for integrase B7402 sequence
cgtattgattttactcgtttagaggacgatacaagtttaaatataacgctattgctataattttactattgtcgcaatagcgtagtatatgatatagtgtaatcattgagacacaaatacataggtgtaacaatcattacactattttttcgtcgtgtaagctaccgagcgacgttataataaatcggtgaggtgtagcacgcccaagcaaagaggtaaaaccccgtaagtgattagacggtggtagctcggtggtatag

SEQ ID NO: 33402 - DNA, 260 bp, Unknown
  Description of Unknown: RightRegion for integrase B7403 sequence
ataatatcaaaaattgtaattggcaagggaaatatagaaattcagttaaaaactttttagcagaaactatacgccagaggtgtgacatatagtaagtgctaatgccgtatttatcacgtttttaagctagtgaaccatcagaattataatgggttttgtttattttgcattttaaattgacctaacaagacataagtgtttgcataaaaaatattttattgtataatgagaatacggaggtgcaagcaaatggatattga

SEQ ID NO: 33403 - DNA, 260 bp, Unknown
  Description of Unknown: RightRegion for integrase B7404 sequence
ctgaaatgcatcgttttcgaccggaagaccgagcattttgattttcaatattatgcatgaaatagcggagaaccttgaaaaataaggctctccgcttattataggttactgcactttagaccgccatactggctcattacatattgcgcgatcttcggattcggcgtcttgatattgactggatattgtaatcttttttcatatctccacatacgctacacctccccttcccacggccagcgctctgtaagccaggacca

SEQ ID NO: 33404 - DNA, 260 bp, Unknown
  Description of Unknown: RightRegion for integrase B7405 sequence
ataaaacggatcatcttacagaaaaacggagaaattattataaaatggagggtaaaataatataattctattgacaatatttaaaatgtacgttataatgtacatataataagataggaggaaaacaaatgtctattacgaatgctactactttgcgtaaaaacctgttcgggtatttagacgcggctgctgtcaacgacgagacgattattgtcacgacgaaaaatggcaatgcagcgattatcagcgaagagtatctg

SEQ ID NO: 33405 - DNA, 260 bp, Unknown
  Description of Unknown: RightRegion for integrase B7406 sequence
ataaaacggatcatcttacagaaaaacggagaaattattataaaatggagggtaaaataatataattttgattgaaagaaaacaaatgcttattatgaatgcaaccactttgcgtaaaaacctgtccggctatttggacgcggccgctgtaaacgacgagacgattattgtcacgacgaaaaatggcaatgcagcgattatcagcgaagagtatctgcgcagtttggaagaaacttgttatttatgcagcatcccctgga

SEQ ID NO: 33406 - DNA, 109 bp, Unknown
  Description of Unknown: RightRegion for integrase B7407 sequence
acgctgttggtggtgttcctggatgggactgagattgaatgtagaagtgaaaaagaataatagaatacaccagctaaaataaattattttggttggtgtatttttattg

SEQ ID NO: 33407 - DNA, 260 bp, Unknown
  Description of Unknown: RightRegion for integrase B7408 sequence
ataaaagaaatacatcttaatgcagataacagtttcgtaaactttatcgattttctttgacgctcttttgtttgtattaactttcgctcccccaaccgcgagtgggggtatggcgcgctggatctgttccagacatttcttcatctgagggaataaatccgcggaaaaaattgcggatacaaacttatggggatcatccgtgtaatatcagccgcgcattcggatcagcggcccgccgctcttctccaggtacggacggg

SEQ ID NO: 33408 - DNA, 72 bp, Unknown
  Description of Unknown: RightRegion for integrase B7409 sequence
tatataaggaaagtaatacataagatagttatagatgaaaatgagatagttatatattaattgttatttgga

SEQ ID NO: 33409 - DNA, 260 bp, Unknown
  Description of Unknown: RightRegion for integrase B7410 sequence
actatcataaaagaaatagttgtcacaaaggatgatatgacgctaacgctagacttctaaggggtttagcgtctttctgttatttagtcaagctaattaagataagttagagttagtaacattattttcaacttcatacatctgcaatgaatgaaacacgagatcacgatatttccaagtgctgaccagatactcaatcacctcctggtcctctatcttgcattccatgagaagtaatagcttgaccgtgtacttatttt

SEQ ID NO: 33410 - DNA, 260 bp, Unknown
  Description of Unknown: RightRegion for integrase B7411 sequence
acactaatcgagaagatagtgattgatggcgaggatttggagatatattggaaattctaaaaaactatagccaatcgtaaccctgtattcgtcacagagtcgtgtagtatggatattcttaaattctctgtttccgcttctaataaagggttattttgattaaactgaacattcattaggttgcttattcgtgtataaaactgttttataaaaatatcatctaatttgaaattgttaactttatatcttcctttttccaa

SEQ ID NO: 33411 - DNA, 140 bp, Unknown
  Description of Unknown: RightRegion for integrase B7412 sequence
agcataagaaatataatagattatatagaatttgatggtgattactttacaatatactaattatgtctctttgaagaactttgcggttccttgatctaaagcaataatatatcttttcataattaattttctactccttt

SEQ ID NO: 33412 - DNA, 260 bp, Unknown
  Description of Unknown: RightRegion for integrase B7413 sequence
gttgaaagtatcgtattttcacggcctaatactgctataaaaatttatttccgcctctaattatacgcatttgaagtatggaggtcctcacggcgagctcggagcttcgctgcgctacctttctcagcgctgttccatgccgtacagagaagtagccggaatactcaacgacgtgggtagtgaagcccctaaaatgttccttttaggggctaatgctttttttgacgctttcgccaccgtataactccatttcaaaggga

SEQ ID NO: 33413 - DNA, 260 bp, Unknown
  Description of Unknown: RightRegion for integrase B7414 sequence
ggactactagaatccatcaccgtagacggacgcaagatatccctcaaatggcgcatttagagcggtttcttagactttcacaaatttatatgtactacgtgcatggccttcggctgtaacgccgctggagtaatcggttgccgcattattgattcaccgcgggaacggctgattgccattttaactaacagtttcactccctgcaatggccgcctgcccatgctgattgccctgctgactatgttttttgccgccagcaa

SEQ ID NO: 33414 - DNA, 260 bp, Unknown
  Description of Unknown: RightRegion for integrase B7415 sequence
tatataaggaaagtaataaataagatagttatagatgaaaatgagatagttatatattaattgttatttggagcgtataggtgaacctacaaagtcaaaataacaattaaaaaaagagggtactatttaccctctaatttcttgtttatttcatctaattttcttataataatccagttctgatttattaatatttcattctgttgtattaaagtattttgtatagagtcaccttttaaaatagcttgtactttcaagaa

SEQ ID NO: 33415 - DNA, 260 bp, Unknown; identical to SEQ ID NO: 33273
  Description of Unknown: RightRegion for integrase B7416 sequence

SEQ ID NO: 33416 - DNA, 109 bp, Unknown
  Description of Unknown: RightRegion for integrase B7417 sequence
gttgaaaaaatagtgctgcatcgtccctcaaatgaaattgaaattttttatcattattaattatctcttaaaacaatgcgctccaccatattgactaatgataattttt

SEQ ID NO: 33417 - DNA, 170 bp, Unknown
  Description of Unknown: RightRegion for integrase B7418 sequence
gaagatatcgtttatgacaagaaaaacagcaagctgatattccatctttatatctcgtaagccctctgtttataagggtttgcggatatgttataggttactgcaatatgggccgccaaattgtgaaatgatcactttggcaatctgtgggttcgtttgtgtaatcttta

SEQ ID NO: 33418 - DNA, 260 bp, Unknown
  Description of Unknown: RightRegion for integrase B7419 sequence
acattaattaaacgtgtagaggtaaagcgtgatgaaatcgacgttatttttaaattgtaaaattacagtatttaggagcacctactaatattgttgtgcatgccataatatgcttctccttttactttctataattcatccgcaattttattaattttacgtaatctgtggttaacaccactcttggtcaatgtgccttccaaatggtcggcaatttgttgaatggaataatctggattttcaacacggattttagccac

SEQ ID NO: 33419 - DNA, 260 bp, Unknown
  Description of Unknown: RightRegion for integrase B7420 sequence
gaggatatcgtttatgataagaaaaacggaaaactgatcttccatctttacatatcgtgagccctctgtttataagggtttgcggatatgttataggttactgcaatcagggccaccaaatagcaataacctataatatttttacatattataaatatacacgaaaatgatacaatattcgcccctcagagagttgatctccgaggggattttgttaaatcttttttacaggttctcgatacagaggctccatcgctctc

SEQ ID NO: 33420 - DNA, 260 bp, Unknown
  Description of Unknown: RightRegion for integrase B7421 sequence
gaagatatcgtttatgacaagaaaaacagcaagctgatattccatctttatatctcgtaagccctctgtttataagggtttgcggatatgttataggttactgcaatatgggccaccaaattgtgaaatgatcactttggcaatctgtgggttcgtttgtgtaatctttaccggatattgcaatcgtttttcataattccacataatcagcatcctccttcctgccacggccacggctcattgatccatttccagtattc

SEQ ID NO: 33421 - DNA, 260 bp, Unknown
  Description of Unknown: RightRegion for integrase B7422 sequence
gattatattgttcaagatgcggatgatccagtaaataattggcatgttttttttaagtaaatcgtgtgcataacactcaatgtccatgagttaatattaaataatctattttttttattcctgatgatctaaaataaggtatcaatacattttttgatatattaaaatttatattaccacctgtatctattaatatatttttgcttttaattctaattaaaatagaatctccctgacctacatctaaaaaatgaacttca

SEQ ID NO: 33422 - DNA, 260 bp, Unknown
  Description of Unknown: RightRegion for integrase B7423 sequence
gtacgtcaaattgtttacatgaagaaaacccaatctattgaaattctttatcaaatataaattatctccttttacaactaggaccgccaaattacaaaaggagatatataattgaataccacaaaataccagtggacttacttcttccctcctgctataatagacataaaggagggatttttttgaatattgctatatgtgacgacgagcctgtttttgtagattatttttcgaaaatcgtaaacgaatactttgaggaa

SEQ ID NO: 33423 - DNA, 260 bp, Unknown
  Description of Unknown: RightRegion for integrase B7424 sequence
gaagatatcgtttatgacaagaaaaacggcaaactgatcttccatctttacatatcgtgagccctctgtttataagggtttgcggatatgttataggttactgcaatccgggccgccaaattgtgaaatgatcactttggcaatctgtgggttcgtttgtgtaatctttaccggatattgcaatcgtttttcataattccacataatcagcatcctccttcctgccacggccacggctcattgatccatttccagtattc

SEQ ID NO: 33424 - DNA, 260 bp, Unknown
  Description of Unknown: RightRegion for integrase B7425 sequence
gaccagattgtatatgacaaagaatccggtaagatgtactttgacattatcgtatcatgattccagttcttctttttcccctataaagagcccggaacacgcataaatactgggtttgtggcactattatagggtattgcagtccgggccaccatactgactcatgatgaactgggcgatctttgcatttggagtcttaatatttaccggatactgcagtcttttttcataattccacataaactatctgcaccctcctt

SEQ ID NO: 33425 - DNA, 109 bp, Unknown
  Description of Unknown: RightRegion for integrase B7426 sequence
gaggatatcgtttatgacaagaaaaacggcaaactagtcttccatctttacatatcgtgaaccctctgtttataagggtttgcggatatgttataggttactgcaatcc

SEQ ID NO: 33426 - DNA, 260 bp, Unknown
  Description of Unknown: RightRegion for integrase B7427 sequence
gaagatatcgtttatgacaagaaaaacggcaaactagtcttccatctttacatatcgtgaaccctctgtttataagggtttgcggatatgttataggttactgcaatccggtccaccaaattgtgaaatgatcactttggcaatctgtgggttcgtttgtgtaatctttaccggatattgcaatcgtttttcataattccacataatcagcatcctccttcctgccacggccacggctcattgatccatttccagtattc

SEQ ID NO: 33427 - DNA, 260 bp, Unknown
  Description of Unknown: RightRegion for integrase B7428 sequence
gaagatatcgtttatgacaagaaaaacagcaagctgatattccatctttatatctcgtaagccctctgtttataagggtttgcggatatgttataggttactgcaatatgggccgccaaattgtgaaatgatcactttggcaatctgtgggttcgtttgtgtaatctttaccggatattgcaatcgtttttcataattccacataatcagcatcctccttcctgccatggccacggctcattgatccatttccagtattc

SEQ ID NO: 33428 - DNA, 260 bp, Unknown
  Description of Unknown: RightRegion for integrase B7429 sequence
gaggatatcgtttatgacaagaaaaacggcaaactagtcttccatctttacatatcgtgagctctctgtttataagggtttgcggatatgttataggttactgcaatacgggccgccaaattgtgaaatgatcactttggcaatctgtgggttcgtttgtgtaatctttaccggatattgcaatcgtttttcataattccacataatcagcatcctccttcctgccatggccacggctcattgatccatttccagtattc

SEQ ID NO: 33429 - DNA, 260 bp, Unknown
  Description of Unknown: RightRegion for integrase B7430 sequence
gattatattgttcaagatgcggaggatccagtaaataattggcatgttttttttaagtaaatcgtgtgcataacactcaatgtccatgagttaatattaaataatctattttttttattcctgatgatctaaaataaggtatcaatacattttttgatatattaaaatttatattaccacctgtatctattaatatatttttgcttttaattctaattaaaatagaatctccctgacctacatctaaaaaatgaacttca

SEQ ID NO: 33430 - DNA, 260 bp, Unknown
  Description of Unknown: RightRegion for integrase B7431 sequence
gaccagattgtttatgacaaagaatccggtaagatgtactttgacattatcgtatcgtaattataataccttattctcccttacataatgcctgaaagccgcataaatactggctttgcggcactattatagggtattacagtccgggccaccatactgactcatgatgaactgggcgatctttgcatttggagtcttaatatttaccggatactgcagtcttttttcataattccacataaactatctgcaccctcctt

SEQ ID NO: 33431 - DNA, 113 bp, Unknown
  Description of Unknown: RightRegion for integrase B7432 sequence
gaagatattgtttatgacaaggagaacggtaagctgattttccatctttattcctcgtaaagccctctgttgtgggctttacattatattatatgtttttgcattatggtggt

SEQ ID NO: 33432 - DNA, 260 bp, Unknown
  Description of Unknown: RightRegion for integrase B7433 sequence
gaagatatcgtttatgacaagaaaaacggcaaactgatcttccacctttatatctcgtgagccctctgtttataagggtttacggatatgttataggttactgcaatcagggccgccaaattgtgaaatgatcactttggcaatctgtgggttcgtttgtgtaatctttaccggatattgcaatcgtttttcataattccacataatcagcatcctccttcctgccatggccacggctcattgatccatttccagtattc

SEQ ID NO: 33433 - DNA, 109 bp, Unknown
  Description of Unknown: RightRegion for integrase B7434 sequence
atgttggtatcaagagttgaagtcacgcctgatgaaattaggcttatttttaaattgtaaaatattaggatttagtcccgaccatcaagtttggcgcaaagacgcgcat

SEQ ID NO: 33434 - DNA, 260 bp, Unknown
  Description of Unknown: RightRegion for integrase B7435 sequence
gaggatatcgtttatgacaagaaaaacggcaaactgatcttccacctttatatctcgtgagccctctgtttataagggtttacggatatgttataggttactgcaatccgggccgccaaattgtgaaatgatcactttggcaatctgtgggttcgtttgtgtaatctttaccggatattgcaatcgtttttcataattccacataatcagcatcctccttcctgccatggccacggctcattgatccatttccagtattc

SEQ ID NO: 33435 - DNA, 260 bp, Unknown; identical to SEQ ID NO: 33420
  Description of Unknown: RightRegion for integrase B7436 sequence

SEQ ID NO: 33436 - DNA, 109 bp, Unknown
  Description of Unknown: RightRegion for integrase B7437 sequence
gaccagattgtatatgacaaagaatccggtaagatgtactttgacattatcgtatcatgattccagttcttcttttccccttataaagtgcccgaaaccagcataaata

SEQ ID NO: 33437 - DNA, 260 bp, Unknown
  Description of Unknown: RightRegion for integrase B7438 sequence
cgccctcaaccgagagcgggagaaaattttatcagaacctgttcagtcccttgcggataatagccgcaggaaaatcacgatagcagcagtccatgtcaacattacccttaataccataaaccttgcccttccagctgtactgccagatgcctacgtcgtcagcagagatgcacttggggaaaatgttctccactctcgcaacccagcaggtgtaacgcttgggcatgtcagcgctcagcttgtccctgaaaaatgtgtca

SEQ ID NO: 33438 - DNA, 260 bp, Unknown
  Description of Unknown: RightRegion for integrase B7439 sequence
gaagatattatttatgacaaagaaaatggaaagatgattttccacctttattcctcataaatcccactgttgtgggatttatgatatattataggtttttgcaatatggtggtcctgacggagaactcgctgcatctatgcgctatctctcccagagatatacgatgccataccgggaagtgatcggaactttaacagacatcggtaccgaggaattagcaccatcttgttatctgtaacaattacatataaataagtaa

SEQ ID NO: 33439 - DNA, 109 bp, Unknown
  Description of Unknown: RightRegion for integrase B7440 sequence
gttgaaaaaatagtgctgcattgcccttcaaacgaaattgaaattttttatcattattgattatctcttaaaacaatatgcaccaccatattgactaatgataattttt

SEQ ID NO: 33440 - DNA, 260 bp, Unknown
  Description of Unknown: RightRegion for integrase B7441 sequence
gaagatatcgtttatgacaagaaaaacagcaagctgatattccacctttatatctcgtaagccctctgtttataagggtttgcggatatgttataggttactgcaatatgggccgccaaattgtgaaatgatcactttggcaatctgtgggttcgtttgtgtaatctttaccggatattgcaatcgtttttcataattccacataatcagcatcctccttcctgccacggccacggctcattgatccatttccagtattc

SEQ ID NO: 33441 - DNA, 109 bp, Unknown
  Description of Unknown: RightRegion for integrase B7442 sequence
gaccagattgtttatgacaaagaatccggcaagatgtactttgacattatcgtatcgtaattataataccttattctcccttacataatgcctgaaagccgcataaata

SEQ ID NO: 33442 - DNA, 260 bp, Unknown
  Description of Unknown: RightRegion for integrase B7443 sequence
gaccagattgtatatgataaagaatccgggaaaatgtattttgatattatagtgtcgtagtcaaagcccttttcgttctctccaagatccgcaaagccgcataaatactagctttctggcactatcatagggtatcgtgaactggtcccccatactgactcataatatactgagcaatttttgcattgggagttttgatgttaacaggatactgtaatcttttttcataattccacatttacctgcaacctccttcctgt

SEQ ID NO: 33443 - DNA, 109 bp, Unknown; identical to SEQ ID NO: 33433
  Description of Unknown: RightRegion for integrase B7444 sequence

SEQ ID NO: 33444 - DNA, 260 bp, Unknown
  Description of Unknown: RightRegion for integrase B7445 sequence
gaagatatcgtttatgacaagaaaaacggcaaactgatcttccatctttacatatcgtgagccctctgtttataagggtttgcggatatgttataggttactgcaatccgggccgccaaattgtgaaatgatcactttggcaatctgtgggttcgtttgtgtaatctttaccggatattgcaatcgtttttcataattccacataatcagcatcctccttcctgccatggccacggctcattgatccatttccagtattc

SEQ ID NO: 33445 - DNA, 260 bp, Unknown
  Description of Unknown: RightRegion for integrase B7446 sequence
gaagatatcgtttatgacaagaaaaacagcaagctgatattccatctttatatctcgtaagccctctgtttataagggtttgcggatatgttataggttactgcaatatggtccaccaaattgtgaaatgatcactttggcaatctgtgggttcgtttgtgtaatctttaccggatattgcaatcgtttttcataattccacataatcagcatcctccttcctgccacggccacggctcattgatccatttccagtattc

SEQ ID NO: 33446 - DNA, 260 bp, Unknown
  Description of Unknown: RightRegion for integrase B7447 sequence
attgcagagatccggctaaatgaagacagcagcttcgttaaaagcatcgaactcatttagccgtgagttgtattaaccttaccgcacccaaccgagagtggggatacggtacgctggatctctatcagacctttttacgtatcagagaataaattaatgatagcctctcattcggatgagaggacctccgtttttatcgaggtatgctctcgtaatgacgacggaaccgatctcggggtccttcgggatttcatacatga

SEQ ID NO: 33447 - DNA, 260 bp, Unknown
  Description of Unknown: RightRegion for integrase B7448 sequence
gaggatatcgtttacgacaagaaaaacggcaaactgatcttccacctttacatatcgtgagccctctgtttataagggtttgcggatatgttataggttactgcaatccgggccaccaaatagcaataacctataatatttttacatattataaatatacacgaaaatgatacaatattcaggacggcaactccatccgcccaacactcatatacgctgcacgtaaaaaggtgtgcatcatttcggttgtcaggatcatc

SEQ ID NO: 33448 - DNA, 109 bp, Unknown
  Description of Unknown: RightRegion for integrase B7449 sequence
acattaattaaacgtgtagaagttaaacgtgatgaaatcaacattatttttaaattgtaaaattacagtatttaggagcaccgactaatatagttgtacatgccataat

SEQ ID NO: 33449 - DNA, 260 bp, Unknown
  Description of Unknown: RightRegion for integrase B7450 sequence
gaggatatcgtttatgacaagaaaaacggcaaactagtcttccatctttacatatcgtgaaccctctgtttataagggtttgcggatatgttataggttactgcaatccagtccgccaaattgtgaaatgatcactttggcaatctgtgggttcgtttgtgtaatctttaccggatattgcaatcgtttttcataattccacataatcagcatcctccttcctgccacggccacggctcattgatccatttccagtattc

SEQ ID NO: 33450 - DNA, 109 bp, Unknown
  Description of Unknown: RightRegion for integrase B7451 sequence
acattaattaaacgtgtagaagttaaacgtgatgaaatcaacgttatttttaaattgtaaaattacagtatttaggagcacctactaatatagttgtacatgccataat

SEQ ID NO: 33451 - DNA, 113 bp, Unknown
  Description of Unknown: RightRegion for integrase B7452 sequence
gaagatatcgtttatgacaagaaaaacagcaagctgatattccatctttatatctcgtaagccctctgtttataagggtttgcggatatgttataggttactgcaatatgggc

SEQ ID NO: 33452 - DNA, 260 bp, Unknown; identical to SEQ ID NO: 33432
  Description of Unknown: RightRegion for integrase B7453 sequence

SEQ ID NO: 33453 - DNA, 260 bp, Unknown
  Description of Unknown: RightRegion for integrase B7454 sequence
gaggatatcgtttatgacaagaaaaacggcaaactgatcttccacctttatatctcgtgagccctctgtttataagggtttacggatatgttataggttactgcaatccgggccaccaaatagcaataacctataatatttttacatattataaatatacacgaaaatgatacaatattcacccctcagagagctgatctccgagggggtttttattagaacaactggaaccgatcgattgcctgtccgaacgctccagc

SEQ ID NO: 33454 - DNA, 260 bp, Unknown; identical to SEQ ID NO: 33432
  Description of Unknown: RightRegion for integrase B7455 sequence

SEQ ID NO: 33455 - DNA, 260 bp, Unknown
  Description of Unknown: RightRegion for integrase B7456 sequence
gaccagattgtctatgacaaagaatccggcaaaatgtactttgacattatcgtatcgtaattttaatcccttcttctcccttataaagtgcctgaaacccgcataaatacaggctttgtggcactattatagggtattacagtccagtccaccagagtgcaataccctataatataataataagctatatataaagcctaaaaagccttataaaacaaggaaaactgagcattttagacagcatctttctgctggcccgg

SEQ ID NO: 33456 - DNA, 260 bp, Unknown
  Description of Unknown: RightRegion for integrase B7457 sequence
gaagatatcgtttatgacaagaaaaacggaaaactgatcttccatctttacatatcgtgagccctctgtttataagggtttgcggatatgttataggttactgcaatatgggccaccaaattgtgaaatgatcactttggcaatctgtgggttcgtttgtgtaatctttaccggatattgcaatcgtttttcataattccacataatcagcatcctccttcctgccacggccacggctcattgatccatttccagtattc

SEQ ID NO: 33457 - DNA, 109 bp, Unknown
  Description of Unknown: RightRegion for integrase B7458 sequence
gaccagattgtatatgacaaagaatccggtaagatgtactttgacattatcgtatcatgattccagttcttcttttccccctataaagtgcccggagcccgcataaata

SEQ ID NO: 33458 - DNA, 260 bp, Unknown
  Description of Unknown: RightRegion for integrase B7459 sequence
ataaaagaaattagagtaatatccttttacccattaaaaatttcaattttattctattaaaaagcaacttttatagagttgcttttttttgttagtatgttatacttttttaaaagaggtgataaaaatggaaaataaaattcaaaaactagttgacattataaaaaattctaaatatcttgttttcttcacaggagcaggagtctctactgatagtggattaaagagttttagaggaaaagacggcttgtacagcactc

SEQ ID NO: 33459 - DNA, 141 bp, Unknown
  Description of Unknown: RightRegion for integrase B7460 sequence
atgttggtatcaagagttgaagtcacgcctgatgaaattaggcttatttttaaattgtaaaatattaggatttagtcccgaccatcaagtttggcgcaaagacgcgcatgacttgatagaatgggaaattccatggttcaa

SEQ ID NO: 33460 - DNA, 260 bp, Unknown
  Description of Unknown: RightRegion for integrase B7461 sequence
ggcgagcccagaccttcgcgtggacgcgcctacaaaaactttatcgttgagttttattaattttttgctcgcttaggcataccatttagcgccctgtgcgcccgcgctttgtcatcgggatgccttgtttgcagagcgggcagtcctctggcttgtaggtctcgacgttgaggtgcagcagtgcggtgcacgggacgtcgccgaaattgactttgccgccgctgcggtcgacgagcatgctgacggcgacggggatgccg

SEQ ID NO: 33461 - DNA, 260 bp, Unknown
  Description of Unknown: RightRegion for integrase B7462 sequence
gaccagattgtatatgacaaagaatccggtaagatgtactttgatattatcgtatcgtaattttggtgtgccattttcctctataaagtgcctgaaacccgcataaacactggctttgtggcactattatagggtattgcagtctggtccaccatactgactcatgataaactgcgcaagttttgcattcggtgtctttatattgaccgggtattggagccttttttcataattccacataaattatctgcaacctcctt

SEQ ID NO: 33462 - DNA, 109 bp, Unknown
  Description of Unknown: RightRegion for integrase B7463 sequence
gttgaaaaaatagtgttgcatcgtccctcgaacgaaattgaaattttttattattattaattatctcttaaagcaatacgctccaccatattgactaatgataattttt

SEQ ID NO: 33463 - DNA, 260 bp, Unknown
  Description of Unknown: RightRegion for integrase B7464 sequence
gaccagattgtatatgacaaagaatccggtaaaatgtactttgacattatcgtatcatgattccagttcttcttttccccttataaagtgcccgaaaccagcataaatactgggtttgtagcactattatagggtattacagtccgggccaccagacttcaataccctataataccaaaaattgacatttttcagatgatacaatattctcggcagatgggtacctgccgggagttttttagatcgcgatcagatctttc

SEQ ID NO: 33464 - DNA, 109 bp, Unknown
  Description of Unknown: RightRegion for integrase B7465 sequence
gaccagattgtatatgacaaagaatccggtaaaatgtactttgacattatcgtatcatgattccagttcttcttttccccttataaagtgcccgaaacccgcataaata

SEQ ID NO: 33465 - DNA, 260 bp, Unknown
  Description of Unknown: RightRegion for integrase B7466 sequence
gtacgtcaaattgtttacatgaagaaaacccaatctattgaaattctttatcaaatataaattatctccttttacaactaggactgcaagctggactcagcaagagacggtcaatttctgcgatgtgattccgatttccgctattgtggcaggggcggtgtttacaaagcaaatttatacgggtacaaggatttatacttatacggtcacctgtacatctgttgagctttcggcaagaagtgctcccgattgggactgct

SEQ ID NO: 33466 - DNA, 260 bp, Unknown
  Description of Unknown: RightRegion for integrase B7467 sequence
gaagatatcgtttatgacaagaaaaacagcaagttgatattccatctttatatctcgtaagccctctgtttataagggtttgcggatatgttataggttactgcaatatgggccgccaaattgtgaaatgatcactttggcaatctgtgggttcgtttgtgtaatctttaccggatattgcaatcgtttttcataattccacataatcagcatcctccttcctgccacggccacggctcattgatccatttccagtattc

SEQ ID NO: 33467 - DNA, 109 bp, Unknown
  Description of Unknown: RightRegion for integrase B7468 sequence
gaggatatcgtttatgacaagaaaaacggcaaactgatcttccacctttatatctcgtgagccctctgtttataagggtttacggatatgttataggttactgcaatcc

SEQ ID NO: 33468 - DNA, 260 bp, Unknown
  Description of Unknown: RightRegion for integrase B7469 sequence
gaggatatcgtttatgacaagaaaaacggcaaactgatcttccacctttatatctcgtgagccctctgtttataagggtttacggatatgttataggttactgcaatccgggccaccaaataacaataacctataatatttctacatattataaatatacacgaaaatgatacaatattcaccccctcagagagcagctctctgaggggattttatttagaacaactgaaaccgatcgatcgcctgtccgaacgctccag

SEQ ID NO: 33469 - DNA, 154 bp, Unknown
  Description of Unknown: RightRegion for integrase B7470 sequence
gaccagattgtctatgacaaagaatccggcaagatgtactttgacattatcgtatcgtaattttaatcccttcttctcccttataaagtgcctgaagcccgcataaatacaggatttgtggcactattatagggtattgcagtctggtccacca

SEQ ID NO: 33470 - DNA, 260 bp, Unknown; identical to SEQ ID NO: 33432
  Description of Unknown: RightRegion for integrase B7471 sequence

SEQ ID NO: 33471 - DNA, 260 bp, Unknown
  Description of Unknown: RightRegion for integrase B7472 sequence
gaggatattgtctatgacaagaaaaacggcaaactaatcttccatctttacatatcgtgagccctctgtttataagggtttacggatatgttataggttactgcaatccgggccaccaaataacaataacctataatatttctacatattataaatatacacgaaaatgatacaatattcaccccctcagagagcagctctctgaggggattttatttagaacaactgaaaccgatcgatcgcctgtccgaacgctccag

SEQ ID NO: 33472 - DNA, 109 bp, Unknown
  Description of Unknown: RightRegion for integrase B7473 sequence
gaacccgcccgattcacgttcgagcgggttcgtacaaatttgcgttggtgcgccatatagggttcgaacctacggccttctgctccggaggcagacgctctaatccact

SEQ ID NO: 33473 - DNA, 109 bp, Unknown; identical to SEQ ID NO: 33450
  Description of Unknown: RightRegion for integrase B7474 sequence

SEQ ID NO: 33474 - DNA, 260 bp, Unknown
  Description of Unknown: RightRegion for integrase B7475 sequence
gaagatatcgtttatgacaagaaaaacggcaaactagtcttccatctttacatatcgtgaaccctctgtttataagggtttgcggatatgttataggttactgcaatccggtccgccaaattgtgaaatgatcactttggcaatctgtgggttcgtttgtgtaatctttaccggatattgcaatcgtttttcataattccacataatcagcatcctccttcctgccacggccacggctcattgatccatttccagtattc

SEQ ID NO: 33475 - DNA, 109 bp, Unknown
  Description of Unknown: RightRegion for integrase B7476 sequence
gaagatatcgtttatgacaagaaaaacagcaagctgatattccatctttatatctcgtaagccctctgtttataagggtttgcggatatgttataggttactgcaatat

SEQ ID NO: 33476 - DNA, 109 bp, Unknown
  Description of Unknown: RightRegion for integrase B7477 sequence
gaccagattgtttatgacaaagaatccggtaagatgtactttgacattatcgtatcgtaattataataccttattctcccttacataatgcctgaaagccgcataaata

SEQ ID NO: 33477 - DNA, 109 bp, Unknown; identical to SEQ ID NO: 33476
  Description of Unknown: RightRegion for integrase B7478 sequence

SEQ ID NO: 33478 - DNA, 158 bp, Unknown
  Description of Unknown: RightRegion for integrase B7479 sequence
gaggatatcgtttacgacaaggagaacggtaagatgattttccacctctacgcctcgtaaagcccgctgttgtgggctttataatatattatatgtttttgcagtttggtggtcccgacggcgaactcgccgcatctatgcgttatctttcccagcga

SEQ ID NO: 33479 - DNA, 260 bp, Unknown
  Description of Unknown: RightRegion for integrase B7480 sequence
gaagatatcgtttatgacaagaaaaacagcaagctgatattccatctttatatctcgtaagccctctgtttataagggtttgcggatatgttataggttactgcaatatgggccgccaaattgtgaaatgatcactttggcaatctgtgggttcgtttgtgtaatctttaccggatattgtaatcgtttttcataattccacataatcagcatcctccttcctgccatggccacggctcattgatccatttccagtattc

SEQ ID NO: 33480 - DNA, 260 bp, Unknown
  Description of Unknown: RightRegion for integrase B7481 sequence
gaagatatcgtttacgacaagaaaaacggcaaactgatcttccacctctacatctcgtgagccctctgtttatgggggtttgcgggcatattataggttattgctatatggtggacctgacggagaattggcagcatctatgagatacctgtctcagagatataccatgccgtataaagaagtaactgcgactttaacagatatcggtacatctgtaccgatattgcacacgttacttttcaataaaagatgtttctaaa

SEQ ID NO: 33481 - DNA, 260 bp, Unknown
  Description of Unknown: RightRegion for integrase B7482 sequence
gaggatatcgtttatgacaagaaaaacggcaaactgatcttccacctttatatctcgtgagccctctgtttataagggtttacggatatgttataggttactgcaatccgggccaccaaatagcaataacctataatatttttgcatattataaatatacacgaaaatgatacaatattcaggacggcaactccatccgcccaacactcatatacgctgcacgtaaaaatgtgtgcatcatttcggttgtcaggatcatc

SEQ ID NO: 33482 - DNA, 260 bp, Unknown; identical to SEQ ID NO: 33420
  Description of Unknown: RightRegion for integrase B7483 sequence

SEQ ID NO: 33483 - DNA, 109 bp, Unknown
  Description of Unknown: RightRegion for integrase B7484 sequence
acattaattaaacgtgtagaagttaaacgtgatgaaatcaacgttatttttaaattgtaaaattacagcatttaggagcaccgactaatatagttgtacatgccataat

SEQ ID NO: 33484 - DNA, 109 bp, Unknown
  Description of Unknown: RightRegion for integrase B7485 sequence
gagcagatcatatatgataaggaatccgggaaaatgtcttttgacatcattatttcctgaattgaaaatcccgcaaacccgcataaacactgggtttgcaggtctatta

SEQ ID NO: 33485 - DNA, 260 bp, Unknown
  Description of Unknown: RightRegion for integrase B7486 sequence
gaacagatcatatatgataaggaatctggaaaaatgtcttttgacatcattatttcctgaatttcatccatccataaaaaagtgccatttcagcttttttaacatttttgtaatattttttctgagttaaaaatcccgcaaacccgcataaacactgggttttcatggctattatagggtactgcactccggtggcccggacggtgagatcggcgcttccctgcgttatctttcccagcgttttaccatgccgaaccgaa

SEQ ID NO: 33486 - DNA, 260 bp, Unknown
  Description of Unknown: RightRegion for integrase B7487 sequence
gagcagatcatatatgataaggaatccggaaaaatgtcttttgacatcattatttcctgaatttcatccatccataaaaaagtgccatttcagccttttaacatttttgtaatattttttcagaattgaaaatcccgcaaacccgcataaacactgggtttgcgaggctattatagggtactgcactctggtggcccggacggggagatcggcgcttccctgcgttatctttcccagcgttttaccatgccgaaccgaac

SEQ ID NO: 33487 - DNA, 260 bp, Unknown
  Description of Unknown: RightRegion for integrase B7488 sequence
gagcagatcatatatgataaagaatccgggaaaatgtcttttgacatcattatttcctgaatttcagacctctataaaaagtgccatttcggtcattttaacactttcgtaatattttttcagaattgaaaatcccgcaaacccacataaacactgggtttgcaggtctattatagggtactgcactccggtggcccggatagcaataccctataatataaaaataccgaaaaatgatacaatatcttatgggtaagggt

SEQ ID NO: 33488 - DNA, 260 bp, Unknown
  Description of Unknown: RightRegion for integrase B7489 sequence
gaacagatcatatatgataaggaatccggaaaaatgtcttttgacatcattatttcctgaattgaaaatcctgcaaacccgcataaacactgggtttgcaggtctattatagggtactgcactccggtggcccggacggtgagattggcgcttccctgcgttatctttcccagcgttttaccatgccgaaccgaacgacttctgctttgctcaacgacataggaacagaagaactcagtcatctggaaatggtatccact

SEQ ID NO: 33489 - DNA, 260 bp, Unknown
  Description of Unknown: RightRegion for integrase B7490 sequence
gagcagatcatatatgataaagaatccggaaaaatgtcttttgacatcattatttcctgaatttcagacctctataaaaagtgccatttcggtcattttaacactttcgtaatattttttcagaattgaaaatcccgcaaacccgcataaacactggggttgcggggctattatagggtactgcactccggtggcccggacggtgaaatcagcgcttccctgcgttatctttcccagcgttttaccatgccgaaccgaac

SEQ ID NO: 33490 - DNA, 109 bp, Unknown
  Description of Unknown: RightRegion for integrase B7491 sequence
gagcagatcgtatacgataagaaaaccggtaagatgtactttgatattatcgtcccgtgattttttgtatggtactgcactacggcggtcccgacggtgaaattggtgc

SEQ ID NO: 33491 - DNA, 132 bp, Unknown
  Description of Unknown: RightRegion for integrase B7492 sequence
gaacagatcatatatgataaggaatccggaaaaatgtcttttgacatcattatttcctgaattgaaaatcccgcaaacccgcataagcacttggttttcggggctattatagggtactgcactccggtggcc

SEQ ID NO: 33492 - DNA, 260 bp, Unknown
  Description of Unknown: RightRegion for integrase B7493 sequence
gaacagatcatatatgataaggaatccggaaaaatgtcttttgacatcattatttcctgaattgaaaatcccgcaaacccgcataaacactgggtttgtggggctattatagggtactgcactccggtggcccggacggggagatcggcgcttccctgcgttatctttcccagcgttttaccatgccgaaccgaacgacttctgctttgctcaacgacataggaacagaagaactcagtcatctggaaatggtatccact

SEQ ID NO: 33493 - DNA, 260 bp, Unknown
  Description of Unknown: RightRegion for integrase B7494 sequence
gagcagatcatatatgataaggaatccggaaaaatgtcttttgacatcattatttcctgaatttcagccatccataaaaaagtgctatttcagtctttttaacatttttgtaatattttttctaagttggaaatcccgcaaacccgcataaacactgggtttgcggggctattatagggtactgcactccggtggcccggacggggagattggcgcttccctgcgttatctttcccagcgttttaccatgccgaaccgaa

SEQ ID NO: 33494 - DNA, 260 bp, Unknown
  Description of Unknown: RightRegion for integrase B7495 sequence
gaacagatcatatatgataaggaatccggaaaaatgtcttttgacatcattatttcctgaatttcagacctctataaaaagtgccatttcggtcattttaacactttcgtaatattttttcagaattgaaaatcccgcaaacccgcataaacactggggttgcggggctattatagggtactgcactccggtggcccggacggtgagatcggcgcttccctgcgttatctttcccagcgttttaccatgccgaaccgaac

SEQ ID NO: 33495 - DNA, 109 bp, Unknown
  Description of Unknown: RightRegion for integrase B7496 sequence
agaatagtattaaaaaaagaagatagatatacattagaagtagatatacaatttatataaattatatatctataaaaaaataaattttactgtaacattttatcgtgtt

SEQ ID NO: 33496 - DNA, 109 bp, Unknown
  Description of Unknown: RightRegion for integrase B7497 sequence
gaacagatcatatatgataaggaatccggaaaaatgtcttttgacatcattatttcctgaatttcatccatccataaaaaagtgctatttcggcctttttaacattttt

SEQ ID NO: 33497 - DNA, 260 bp, Unknown
  Description of Unknown: RightRegion for integrase B7498 sequence
atcaaaaatatcatagttgacggcagcagaatcacagtaaatttacggctcaaaaaataattcaacttaaaaaaagaggcttttttataacaaaaacctcttttttttcttgacaaatatatttaacggctctaaaatagaggtgaagctcagaaaaattgaatagtccattggcgcaataatgaagtaacgctataaatattaacttcaatagggcgataaaatattatatcggaaacataagctcaatatcgaaatcc

SEQ ID NO: 33498 - DNA, 109 bp, Unknown
  Description of Unknown: RightRegion for integrase B7499 sequence
gaacagatcatatatgataaggaatccggaaaaatgtcttttgacatcattatttcctgaatttcatccatccataaaaaagtgctttttcagcctttttaacattttt

SEQ ID NO: 33499 - DNA, 260 bp, Unknown
  Description of Unknown: RightRegion for integrase B7500 sequence
gaagaaatcatttatgacaaagaaaaaaactctttagccttccatctataccgttcctaaattggtgactgtctgaaaacccagtatttatgcgggtttcagcgtgttgtagggtaccgtgataagggggccccgacggcgaaattggtgcttcgatgcgctatctatcacagcgtttcgccatgccaaaccgtactgcaatggcagttttaaacgatgtcggcacagaagagctagctcatttagagatggtgtccact

SEQ ID NO: 33500 - DNA, 109 bp, Unknown
  Description of Unknown: RightRegion for integrase B7501 sequence
gaacagattgtctacgataaggcatctgggaaaatgtcatttgacattatcatatcctgaaaattgcttacataaagtaaagtaccattttggcatttttaacactttt

SEQ ID NO: 33501 - DNA, 109 bp, Unknown
  Description of Unknown: RightRegion for integrase B7502 sequence
gagcagattatatatgataaggaatccggaaaaatgtcttttgacatcattatttcctgaattgaaaatcccgcaagcccgcataaacactagggttgcgggactatta

SEQ ID NO: 33502 - DNA, 109 bp, Unknown
  Description of Unknown: RightRegion for integrase B7503 sequence
gagcagatcatatatgataaagaatccgggaaaatgtcttttgacatcattatttcctgaatttcagacctctataaaaagtgccatttcagtcattttaacacttttg

SEQ ID NO: 33503 - DNA, 260 bp, Unknown
  Description of Unknown: RightRegion for integrase B7504 sequence
gaacagatcatatatgataaggaatccggaaaaatgtcttttgacatcattatttcctgaatttcagacttctataaaaagtgccatttcagtcattttaacactttcgtaatattttttcagaattgaaaatcccgcaaacccgcataaacactagggttgcgggactattatagggtactgcactctggtggcccggacggtgagatcggcgcttccctgcgttatctttcccagcgttttaccatgccgaaccgaac

SEQ ID NO: 33504 - DNA, 260 bp, Unknown
  Description of Unknown: RightRegion for integrase B7505 sequence
gaacagatcatatatgataaggaatccggaaaaatgtcttttgacatcattatttcctgaattgaaaatcccgcaaacccgcataaacactagggttgcggaactattatagggtactgcactccggtggcccggacggtgagatcggcgcttccctgcgttatctttcccagcgttttaccatgccgaaccggacgacttctgctttgctcaacgacataggaacagaagaatcagctcatagctgttgtcattttaat

SEQ ID NO: 33505 - DNA, 260 bp, Unknown
  Description of Unknown: RightRegion for integrase B7506 sequence
gagcagatcatatatgataaggaatccggaaaaatgtcttttgacatcattatttcctgaatttcaaccatccataaaaaagtgtcatttcagcctttttaacatttttgtaatattttcccgaactaaaaatcccgcaaactcgcataaacactgggcttgcggggctattatagggtactgcactccggtggcccggacggtgagatcggcgcttccctgcgttatctttcccagcgttttaccatgccgaaccggac

SEQ ID NO: 33506 - DNA, 109 bp, Unknown
  Description of Unknown: RightRegion for integrase B7507 sequence
gagcagatcatatatgataaaggatccggaaaaatgtcttttgacatcattatttcctgaatttcatccctccataaaaaagtgctatttcagcccttttaacattttt

SEQ ID NO: 33507 - DNA, 260 bp, Unknown
  Description of Unknown: RightRegion for integrase B7508 sequence
gaacaaatcatatatgataaggaatccggaaaaatgtcttttgacatcattatttcctgaattgaaaatcccgcaaacccgcataaacactgggtttgcggggctattatagggtactgcactccggtggcccggacggtgaaatcagcgcttccctgcgttatctttcccagcgttttaccatgccgaaccgaacgacttctgctttgctcaacgacataggaacagaagaatcagctcatagctgttatcattttaat

SEQ ID NO: 33508 - DNA, 260 bp, Unknown
  Description of Unknown: RightRegion for integrase B7509 sequence
gaacaaatcatatatgataaggaatccggaaaaatgtcttttgacatcattatttcctgaatttcatccatccataaaaaagtgctatttcggcctttttaacatttttgtaatattttttctgagttaaaaatcccacaaacccgcataaacactgggtttgcggggctattatagggtactgcactccggtggcccggacggtgagatcggcgcttccctgcgttatctttcccagcgttttaccatgccgaaccgga

SEQ ID NO: 33509 - DNA, 260 bp, Unknown
  Description of Unknown: RightRegion for integrase B7510 sequence
gtcattaaagaaataaggattgacaatgaccagaatatcacgggtgttgtttttgggtagtgttgtactaattgaacactacccgtcggttcatctgccagaatcagctgcggacgggtgatcagcgcgcgggcaaccgccgccctctgcttctgtccgccggaaacctcatacggatacttctccagcagcgcgtcgatcccgagcttttcggcaatcggccaaagcctctcctccatctcctgcaccggcgcatctgc

SEQ ID NO: 33510 - DNA, 109 bp, Unknown
  Description of Unknown: RightRegion for integrase B7511 sequence
gaacagatcatatatgataaggaatccggaaaaatgtcttttgacatcattatttcctgaatttcagccatccataaaaaagtgctatttcagcctttttaacattttt

SEQ ID NO: 33511 - DNA, 260 bp, Unknown
  Description of Unknown: RightRegion for integrase B7512 sequence
gaacagatcatatatgataaggaatccggaaaaatgtcttttgacatcattatttcctgaattgaaaatcccgcaaacccgcataaacactgggtttgtggggctattatagggtactgcactccggtggcccggatggtgagattggtgcttctctgcgttatctttcccagcgttttattatgccaaaccggacgacttccgctctgctcaatgacattggaacagaagaactcagtcatctggaaatggtatccacc

SEQ ID NO: 33512 - DNA, 109 bp, Unknown
  Description of Unknown: RightRegion for integrase B7513 sequence
gaacagatcatatatgataaggaatccggaaaaatgtcttttgacatcattatttcctgaatttcatccatccataaaaaagtgctatttcagcctttttaacattttt

SEQ ID NO: 33513 - DNA, 260 bp, Unknown
  Description of Unknown: RightRegion for integrase B7514 sequence
gagcagatcatatatgataaagaatccggaaaaatgtcttttgacatcattgtttcctgaatttcaggcctctataaaaagtgacatttcggtcattttaacactttcgtaatatttttcctgaattggaaatcccgcaaacccgcataaacactgggcttgcggggctattatagggtactgcactccggtggcccggacggggagatcggcgcttccctgcgttatctttcccagcgttttaccatgccgaaccgaac

SEQ ID NO: 33514 - DNA, 222 bp, Unknown
  Description of Unknown: RightRegion for integrase B7515 sequence
attgaaaagatagactgcgacaacttaaagaaagtcttgactatttatttttactcatagccagcaggtcttcaatcaccctgccgcaatcagcagaaatacaaatgctgcggtcttgtatatcctccggcgcagtagcttgaaataagttcacgcatacataatttgcggacttattttttcttactgcgtcttggaacacaaatttaattattactgggg

SEQ ID NO: 33515 - DNA, 260 bp, Unknown
  Description of Unknown: RightRegion for integrase B7516 sequence
gagcagatcgtatacgataaaaaaaccggtaagatgtactttgatatcatcgtcccgtgattttttgtatggtactgcattacggcggtcccgacggggaaattggcgcatctctccgctatctctcccagagatttaccatgccgaaccgcatggctgccgccgttttaaatgatatcggcacggaggaactcgcacacctcgagatggtctccactatcgtccatcagcttacacgagacctctcaatggaagaaatt

SEQ ID NO: 33516 - DNA, 260 bp, Unknown
  Description of Unknown: RightRegion for integrase B7517 sequence
gaacagatcatatatgataaggaatccggaaaaatgtcttttgacatcattatttcctgaattgaaaatcccgcaaacccgcataaacactgggtttgcaggtctattatagggtactgcactccggtggcccggacggggagattggcgcttccctgcgttatctttcccagcgttttaccatgccgaaccgaacgacttctgctttgctcaacgatataggaacagaagaatcagctcatagctgttgtcattttaat

SEQ ID NO: 33517 - DNA, 109 bp, Unknown
  Description of Unknown: RightRegion for integrase B7518 sequence
gaacagatcatatatgataaggaatccagaaaaatgtcttttgacatcattatttcctgaatttcagacctctataaaaagtgccatttcggtcattttaacactttcg

SEQ ID NO: 33518 - DNA, 260 bp, Unknown
  Description of Unknown: RightRegion for integrase B7519 sequence
gagcagatcatatatgataaggaatccggaaaaatgtcttttgacatcattatttcctgaattgaaaatcccgcaaacccgcataaacactgtggttgcgggactattatagggtactgcactccggtggcccggacggggagatcggcgcttccctgcgttatctttcccagcgttttaccatgccgaaccgaacgacttcagctttgctcaacgacataggaacagaagaactcagtcatctggaaatggtatccact

SEQ ID NO: 33519 - DNA, 260 bp, Unknown
  Description of Unknown: RightRegion for integrase B7520 sequence
gagcagatcatatatgataaggaatccggaaaaatgtcttttgacatcattatttcctgaattgaaaattccgcaaacccgcataaacactgggtttgcaggtctattatagggtactgcactccggtggcccggacggggagatcggcgcttccctgcgttatctttcccagcgttttaccatgccgaaccgaacgacttctgctttgctcaacgacataggaacagaagaactcagtcatctggaaatggtatccact

SEQ ID NO: 33520 - DNA, 260 bp, Unknown
  Description of Unknown: RightRegion for integrase B7521 sequence
attgaaaagatagactgcgacaatataaacaaggtcttgactatatatttttattcttaaccgccagcaggtcttcaatcactctgccgcaatcagcagaaatgcaaatactgcggtcttgtatatccactggcgccgctgcttcaaataagttcacgcatatataatttgcggacttattttttcttacggcgtcgtggaacacaaatttaattattactggggtgttaaatccaactccaagttccagaagaacaacc

SEQ ID NO: 33521 - DNA, 260 bp, Unknown
  Description of Unknown: RightRegion for integrase B7522 sequence
gagcagatcatatatgataaagaatccggaaaaatgtcttttgacatcattatttcctgaatttcagacctctataaaaagtgccatttcggtcattttaacactttcgtaatattttttcagaattgaaaatcccgcaaacccgcataaacactgggcttgcggggctattatagggtactgcactctggtggcccggacggtgagattggcgcttccctgcgttatctttcccagcgttttaccatgccgaaccgaac

SEQ ID NO: 33522 - DNA, 260 bp, Unknown
  Description of Unknown: RightRegion for integrase B7523 sequence
gtcattaaagaaataaggattgacaatgaccagaatatcacgggtgttgtttttgggtagtgttgtactaattgaacactacccgtcggctcatcagccaaaattaattcaggatttgttattatcgcgcgtgccactgctgccctttgtttctgtccgcctgacacctcatatggatatttattaagcagcttttcaattccaagcagcgacgctataggtgcaagccttttttccatatccctatagtccacacctga

SEQ ID NO: 33523 - DNA, 260 bp, Unknown
  Description of Unknown: RightRegion for integrase B7524 sequence
gagcagattatatatgataaggaatccggaaaaatgtcttttgacatcattatttcctgaattgaaaatcccgcaagcccgcataaacactagggttgcggggctattatagggtactgcactctggtggcccggacggtgagatcggcgcttccctgcgttatctttcccagcgttttaccatgccgaaccggacgacttctgctttgctcaacgacataggaacagaagaactcagtcatctggaaatggtatccact

SEQ ID NO: 33524 - DNA, 260 bp, Unknown
  Description of Unknown: RightRegion for integrase B7525 sequence
attgaaaagatagactgtgacaacttaaataaagtattgactatttatttttactcatagccagcaggtcttcaatcaccctgccgcaatcagcagaaatacaaatgctgcggtcttgtatatcctccggcgcagtagcttgaaataagttcacgcatatataatttgcggacttattttttcttactgcgtcatggaacacaaatttaattattacgggtgtgttcattccaacgccaagctctaataacaacattttt

SEQ ID NO: 33525 - DNA, 260 bp, Unknown
  Description of Unknown: RightRegion for integrase B7526 sequence
gaacagatcatatatgataaggaatccggaaaaatgtcttttgacatcattatttcctgaatttcagccatccataaaaaagtgctatttcagcctttttaacatttttgtaatattttttctgagttaaaaatcccgcaaacccgcataaacactgggtttgcaggtctattatagggtactgcactccggtggcccggacggggagatcggcgcttccctgcgttatctttcccagcgttttaccatgccgaaccgaa

SEQ ID NO: 33526 - DNA, 260 bp, Unknown
  Description of Unknown: RightRegion for integrase B7527 sequence
gagcagatcatatatgataaggaatccggaaaaatgtcttttgacatcattatttcctgaattgaaaatcccgcaaacccgcataaacactgtggttgcgggactattatagggtactgcactccggtggcccggacggtgagatcggcgcttccctgcgttatctttcccagcgttttaccatgccgaaccgaacgacttctgctttgctcaacgacataggaacagaagaatcagctcatagctgttgtcattttaat

SEQ ID NO: 33527 - DNA, 260 bp, Unknown
  Description of Unknown: RightRegion for integrase B7528 sequence
gagcagattatatatgataaggaatccggaaaaatgtcttttgacatcattatttcctgaattgaaaatcccgcaagcccgcataaacactagggttgcgggactattatagggtactgcactctggtggcccggacggtgagatcggcgcttccctgcgttatctttcccagcgttttaccatgccgaaccggacgacttctgctttgctcaacgatataggaacagaagaatcagctcataaatgttatcattttagt

SEQ ID NO: 33528 - DNA, 260 bp, Unknown
  Description of Unknown: RightRegion for integrase B7529 sequence
gagcagatcatatatgataaggaatccggaaaaatgtcttttgacatcattatttcctgaattgaaaatcccgcaaacccgcataaacactagggttgcggaactattatagggtactgcactccggtggcccggacggtgagatcggcgcttccctgcgttatctttcccagcgttttaccatgccgaaccggacgacttctgctttgctcaacgacataggaacagaagaatcagctcatagctgttgtcattttaat

SEQ ID NO: 33529 - DNA, 260 bp, Unknown
  Description of Unknown: RightRegion for integrase B7530 sequence
gagcagatcatatatgataaggaatccggaaaaatgtcttttgacatcattatttcctgaatttcatccatccataaaaaagtgccatttcagccttttaacatttttgtaatattttttcagaattgaaaatcccgcaaacccgcataaacactgggtttgcgaggctattatagggtactgcactccggtggcccggacggtgagattggcgcttccctgcgttatctttcccagcgttttaccatgccgaaccgaac

SEQ ID NO: 33530 - DNA, 260 bp, Unknown
  Description of Unknown: RightRegion for integrase B7531 sequence
gagcagatcatatatgataaggaatccggaaaaatgtcttttgacatcattatttcctgaatttcaaccatccataaaaagtgtcatttcagcctttttaacatatttgtaatatttttcccgaactaaaaatcccgcaaacccgcataaacgctgggcttgcggggctattatagggtactgcactccggtggcccggatggtgagatcagtgcttctctgcgttatctttcccagcgttttaccatgccgaaccggac

SEQ ID NO: 33531 - DNA, 109 bp, Unknown
  Description of Unknown: RightRegion for integrase B7532 sequence
gagcagattatatatgataaagaatccggaaaaatgtcttttgacatcattatttcctgaatttcagacttctataaaaagtgccatttcagtcattttaacactttcg

SEQ ID NO: 33532 - DNA, 260 bp, Unknown
  Description of Unknown: RightRegion for integrase B7533 sequence
gagcagatcatatatgataaggaatccggaaaaatgtcttttgacatcattatttcctgaatttcatccctccataaaaaagtgctatttcagctcttttaacatttttgtaatatttttcctgagttaaaaatcccgcaaacccgcataaacactgggtttgcgggactattatagggtactgcactccggtggcccggatggtgaaatcagcgcttccctgcgttatctttcccagcgttttaccatgccgaaccgga

SEQ ID NO: 33533 - DNA, 260 bp, Unknown
  Description of Unknown: RightRegion for integrase B7534 sequence
gaacagatcatatatgataaggaatccggaaaaatgtcttttgacatcattatttcctgaattgaaaatcccgcaaacccgcataaacactgggtttgcaggtctattatagggtactgcactccggtggcccggatggtgaaatcagcgcttccctgcgttatctttcccagcgttttaccatgccgaaccggacgacttctgctttgctcaacgacataggaacagaagaactcagtcatctggaaatggtatccact

SEQ ID NO: 33534 - DNA, 260 bp, Unknown
  Description of Unknown: RightRegion for integrase B7535 sequence
gaacagatcatatatgataaggaatccggaaaaatgtcttttgacatcattatttcctgaattgaaaatcctgcaaacccgcataaacactgggtttgcaggtctattatagggtactgcactccggtggcccggacggtgagattggcgcttccctgcgttatctttcccagcgttttaccatgccgaaccggacgacttctgctttgctcaacgacataggaacagaagaactcagtcatctggaaatggtatccact

SEQ ID NO: 33535 - DNA, 260 bp, Unknown
  Description of Unknown: RightRegion for integrase B7536 sequence
ttcttggaatccacttacgtactaactgatactgacggacgcgctagcttcaggcgctagtggtagcaataccgtggaagttcgagtcttctcggccgcatctttgagtgatctttctagatcactcttttttgttcttctgataaatatatcattgccaaaaagaacatacgtttgtacaatatatattgatagaacttctctattttgttctctgtacatgtttataattttacactgtaacttcttaattaatggaa

SEQ ID NO: 33536 - DNA, 260 bp, Unknown
  Description of Unknown: RightRegion for integrase B7537 sequence
gagcagatcatatatgataaggaatccggaaaaatgtcttttgacatcattatttcctgaattgaaaatcccgcaaacccgcataaacactgggtttacaggtctattatagggtactgcactccggtggcccggacggtgagatcggcgcttccctgcgttatctttcccagcgttttaccatgccgaaccggacgacttctgctttgctcaacgacataggaacagaagaatcagctcatagctgttgtcattttaat

SEQ ID NO: 33537 - DNA, 260 bp, Unknown
  Description of Unknown: RightRegion for integrase B7538 sequence
gaacagatcatatatgataaggaatccggaaaaatgtcttttgacatcattatttcctgaatttcatccatccataaaaaagtgctatttcagcctttttaacatttttgtaatattttttcagaattgaaaatcccgcaaacccgcataaacactgggtttgcaggtctattatagggtactgcactccggtggcccggacggtgagatcggcgcttccctgcgttatctttcccagcgttttaccatgccgaaccgaa

SEQ ID NO: 33538 - DNA, 109 bp, Unknown
  Description of Unknown: RightRegion for integrase B7539 sequence
gaacagatcatatatgataaggaatccggaaaaatgtcttttgacatcattatttcctgaattgaaaattccgcaaacccgcataaacactgggtttgcaggtctatta

SEQ ID NO: 33539 - DNA, 109 bp, Unknown
  Description of Unknown: RightRegion for integrase B7540 sequence
gagcagatcatatatgataaagaatccggaaaaatgtcttttgacatcattatttcctgaatttcagacctctataaaaagtgccatttcggtcattttaacactttcg

SEQ ID NO: 33540 - DNA, 166 bp, Unknown
  Description of Unknown: RightRegion for integrase B7541 sequence
gaacagatcatatatgataaggaatccggaaaaatgtcttttgacatcattatttcctgaattgaaaatcccgcaaacccgcataaacactcaatgtcattaacttaaaagcagaagatatttattcctaaaaggattagatatcttctgctttttttgatatgct

SEQ ID NO: 33541 - DNA, 109 bp, Unknown
  Description of Unknown: RightRegion for integrase B7542 sequence
gagcaaatcatatatgataaagaatccggaaaaatgtcttttgacatcattatttcctgaatttcagacctctataaaaagtgccatttcggtcattttaacactttcg

SEQ ID NO: 33542 - DNA, 260 bp, Unknown
  Description of Unknown: RightRegion for integrase B7543 sequence
tacattaagcagattttacttactgaaaacggagagatagacaagattatatttttttagtcttgtcgttgtactttcctatttgctccatttggagcaaacattaaagtacaacagtaaaaaagagcgtcgctttaacgctctttttggttttaacatttttatcttttcgtcgatagctgtaagaataaattcattacgacttttatatcctagttttttcgctaatttgtcaatttagtcgctggcgttccttttct

SEQ ID NO: 33543 - DNA, 109 bp, Unknown
  Description of Unknown: RightRegion for integrase B7544 sequence
gaacagatcatatatgataaggaatccggaaaaatgtcttttgacatcattatttcctgaattgaaaatcccgcaaacccgcataaacactgggttttcggggctatta

SEQ ID NO: 33544 - DNA, 260 bp, Unknown
  Description of Unknown: RightRegion for integrase B7545 sequence
gagcagatcatatatgataaggaatccggaaaaatgtcttttgacatcattatttcctgaatttcatccatccataaaaaagtgctatttcggcctttttaacattttcgtaatattttttctgagttaaaaatcccgcaaacccgcataaacactgagtttgcggggctattatagggtactgcactccggtggcccggacggggagatcggcgcttccctgcgttatctttcccagcgttttaccatgccgaaccgga

SEQ ID NO: 33545 - DNA, 260 bp, Unknown
  Description of Unknown: RightRegion for integrase B7546 sequence
attgaaaagatagactgcgacaacttaaagaaagtcttgactatttatttttactcatagccagcaggtcttcaatcaccctgccgcaatcagcagaaatacaaatgctgcggtcttgtatatcctccggcgcagtagcttgaaataagttcacgcatatataatttgcggacttattttttcttactgcgtcttggaacacaaatttaattattacgggggtgttttttatctttgttacccgtacagaagaaccccag

SEQ ID NO: 33546 - DNA, 260 bp, Unknown
  Description of Unknown: RightRegion for integrase B7547 sequence
cttattgaccatatcatcatcaaagaagatgaaagcatagagatttactgggccttttaattttatgcgtaaagtaagtttatcggtgtacggatatcatgggacatattattcagaaattccgtttttgctttgtttgcattttcggcgacagcatatgctttttcagcttttcttcctgcatacgctctttctttatcagactgtcaatatttcttgttccgactacagccatccttgttccgtcttttttctttacg

SEQ ID NO: 33547 - DNA, 260 bp, Unknown
  Description of Unknown: RightRegion for integrase B7548 sequence
cttattgaccatatcatcatcaaagaagatgaaagcatagagatttactgggccttttaattttatgcgtaaagtaagtttatcggtgtacgaatatcatgtgacatattagacaggaaatccgttttcgccttatttgcattttcagctgtctgtagtgcttctgttgcgatgttctttgcctttttcagttttttattagcttcttccattttcttcatggtctgtaactgaagttcattatttcttttttcatattc

SEQ ID NO: 33548 - DNA, 168 bp, Unknown
  Description of Unknown: RightRegion for integrase B7549 sequence
cttattgaccatatcatcatcaaagaagatgaaagcatagagatttactgggccttttaattttatgcgtaaagtaagtttatcggtgtacggatatcatgggacatattattcagaaattccgtttttgctttgtttgcattttcggcgacagcatatgcttttttc

SEQ ID NO: 33549 - DNA, 260 bp, Unknown
  Description of Unknown: RightRegion for integrase B7550 sequence
gggcaggtcatagtgaagttcttggatggaacagaattagaatgtaagatggagagctaatcaagatattaccttggttagctcttttgatactaaggaatagttactcaaattgatttgcaagcaaagaaaggtagagtcttggagcagaaataagcatatcatgtactttgacaaaacctataaggttacttcctttgagaacgggagcgcccacaatagaatcatatcctaacttagatattaacttgttaggatat

SEQ ID NO: 33550 - DNA, 260 bp, Unknown
  Description of Unknown: RightRegion for integrase B7551 sequence
gagatagatgaaaacaaagagatagtaagagttgatttttttagattaacttcgatgtaacttatattcccctgtaggctcatctgccaatataacagatggatgtgtaaccaatgcacgaccaatggatgctctttgttgctgacctccagacaattcatttggtaaatgtgtttttctgttttctaagcctaaatgtttgatgagttcatttagctctttttcatcaacttttctaccatctaaatctagaggaagcg

SEQ ID NO: 33551 - DNA, 109 bp, Unknown
  Description of Unknown: RightRegion for integrase B7552 sequence
atgttggttcaaaaggtcattattcatgacaattccatagaaattatacttgttgagtagtgttgtatcttgatgtacaacattgctctttattttcaaaaagatcagt

SEQ ID NO: 33552 - DNA, 260 bp, Unknown
  Description of Unknown: RightRegion for integrase B7553 sequence
attgagggcatagctccaccaaaaaaaggacttgcttttcagcaggtcctttttccatgaaattcatttctgcgcaacgcgcaaaatatcttcggccggaaatatttgcgccgcaaatgggaaaagcgccggatgcttcgcacagcgcgccgaatgcgctgtttttctgcacgccggtgcatttttcgcgcagaacatacaaacatccggccctatgcgacagcgcgaacgtcccaagaattaagactaattaagatgcc

SEQ ID NO: 33553 - DNA, 260 bp, Unknown
  Description of Unknown: RightRegion for integrase B7554 sequence
ttaatagatagaatcaccgtatacgatgaccgagttgaaataaaatggtcgtttagctgatcattccggcatcaaatttctttcgtgcctcttcttccaacgtcttttttcgctctatatcacgcttataacaaaggtctttgaccttagtaaatgacttttgttattttaatcaaaaatcaaactgcttttgtaaaaaaagaaggggtacagcctcagccgtacccctacaaatcaataattcttaataatcatcttca

SEQ ID NO: 33554 - DNA, 260 bp, Unknown
  Description of Unknown: RightRegion for integrase B7555 sequence
tgtttcgctccaccacgagattgtgaacaaatactgttcacccatagaattaacccataaaaaatccggcagtgcaaaagctgccaccatgctcccgtagcttagttggttagagcatctgactgttaatcagagggtcgtccgttcgagccggaccggaagcgccattttgctgcgaaagcagctacttgtgtctgtagctcagctggatagagcaattgccttctaagcaatgggtcgggggttcaagtcccttcaga

SEQ ID NO: 33555 - DNA, 260 bp, Unknown
  Description of Unknown: RightRegion for integrase B7556 sequence
ttaatagatagaatcaccgtatacgatgaccgagttgaaataaaatggtcatttagctgatcattccggcatcaaatttctttcgtgcctcttcttccaacgtcttttttcgctctatatcacgcttgtaacaaaggtctttgaccttagtcaatgacttttattattttaatcaaaaatcaaactacttttgtaaaaaagaaggggtacagcctcagccgtaccccctacgaatcaataattcttaataatcatctcca

SEQ ID NO: 33556 - DNA, 109 bp, Unknown
  Description of Unknown: RightRegion for integrase B7557 sequence
gatcagattgtttatgacaaagaagagggcaagatgtactttgacatcattgtttcgtgagaagtttcgtggtttttctctttccaaaagtcctgaaagcactgtaaat

SEQ ID NO: 33557 - DNA, 260 bp, Unknown
  Description of Unknown: RightRegion for integrase B7558 sequence
atgttggttcaaaaggtcattattcatgacaattccatagaaattatacttgttgagtagtgttgtatcttgatgtacaacattgctctttattttcaaaaagatcagtggtcaaacggctcattaatttccctgttttttgattatcataatactcaaacggttgtgtttgaagatgttgatataattcttcacgcatatctgtttcaatattcacgcctaacatatgaccaaaataaaccacaataaattgtaaaaac

SEQ ID NO: 33558 - DNA, 260 bp, Unknown
  Description of Unknown: RightRegion for integrase B7559 sequence
ataatcaagcatatcgtgctgaaaaacgatgaaatttacatagaatggcgaataaaatagccatttctatgttttttttacacttttttacgcccctaaatgaaatagctttgtacaaagttgcttctatagggactaaattaaaacatctaataggagtaaattatgacagaagaaattttaaagaggctcaacgaacttttagatgaaacagatttccctctcgcgaaaacaagtttcctatcaaacattaagctttc

SEQ ID NO: 33559 - DNA, 150 bp, Unknown
  Description of Unknown: RightRegion for integrase B7560 sequence
gaacttattaacaaaataagtgttgaaaaaggccatgtccatgttgattttaggtactaatttgctatttctacaaagtacgttcatcgggacgccgtaagtggaaaagcgcacatccaggtcggtgttgaaattgtcgatggccttgat

SEQ ID NO: 33560 - DNA, 260 bp, Unknown
  Description of Unknown: RightRegion for integrase B7561 sequence
attgaaaaaattcttgttgacccccgcaacaaaactatggatatttatttttttgcctaacggtgtaacaacctgtactggaagcacagggattttcctgcccctgtgggcataacccccaatacgtcccttccctccagaatgctttgaatcagcacatcctgcccgtccctgaacgtgtcatagccaaaatactgttttaatatctcatactgcgtcataatcaaactcctctttgctgctccggtataaaaggccgc

SEQ ID NO: 33561 - DNA, 260 bp, Unknown
  Description of Unknown: RightRegion for integrase B7562 sequence
ggaaaggtcatagtaaagtttttggatggaacagaattagaatgtttgatggagagctgatcagggaattaccttggtttgctctttttatatttgctacaatttgtggtatactaaggtcactataaattgtacataagaggatgaacggttatggaaagactaagaggtgtagtagaacgaattacctatgctaatgaagaaactggatatagtgttattaagataaaatgtaagggatacatggaccttgtaactgt

SEQ ID NO: 33562 - DNA, 260 bp, Unknown
  Description of Unknown: RightRegion for integrase B7563 sequence
aaatcagtgaccctctgtaatgaccattctaacatgatctcatctattctatttttataattagttgtaactacttcaatccacagggaatgaagactgttcagaatcagacgttttcgcctaagattccgtcaggtcacagagtaaaaagggttatagatataagatgtaagaggagcttcaatccttacaatgtagatgatccgtctaatctcaagttagacgttaatacaagtatttcaggcgcaaccttcctgcag

SEQ ID NO: 33563 - DNA, 260 bp, Unknown
  Description of Unknown: RightRegion for integrase B7564 sequence
agaaaacacagaaataaagggggagaaaacaccgaaaattttacgaatgtcagtgcgtgaccgatagcgtccagcagcggaccggaaacgcgctgcagatagcgctcaatggcatagggcgtgcagctgcacgcgcgggtggggtgcccaaaatagccgcatgggcagggattcatccatactcacaattcatataaatttgttcaaaatttccaatcaacttcgaatccaccatcggttatcactatcttattcaccag

SEQ ID NO: 33564 - DNA, 260 bp, Unknown
  Description of Unknown: RightRegion for integrase B7565 sequence
agaaaacacagaaataaagggggagaaaacactgaaaattttacgaatgtcagtgcgtgaccgatagcgtccagcagcggaccggaaacgcgctgcagatagcgctcaatggcatagggcgtgcagctgcacgcgcgggtggggtgcccaaaatagccgcatgggcagggattcatccatacccacaattcgtataaacttgctcaaaatttccaatcaacttcgaatcccccctcggttatcactatcttattcaccag

SEQ ID NO: 33565 - DNA, 84 bp, Unknown
  Description of Unknown: RightRegion for integrase B7566 sequence
tataatgagaacggtaaggtcaatacacttaatataagggaaattacttttaaattttaatggtagtagtgttacagggtaggt

SEQ ID NO: 33566 - DNA, 260 bp, Unknown
  Description of Unknown: RightRegion for integrase B7567 sequence
tataatgagaacggtaaggtcaacacacttaatataagtgagattactttcaaattttaatggtagtagtgttacagggtaggtagcaccggtaccccccatagttgcaacgaacatttgtgtaccaggtgtaataattttatctgcatgttctcctgcttgaatcaaatttaagtttgtttcaagatttgcataagtaattgcagcgattgctggttcaacaatagatggaccatgtatacctacaaaccagaagaatg

SEQ ID NO: 33567 - DNA, 260 bp, Unknown
  Description of Unknown: RightRegion for integrase B7568 sequence
attgaaaaaattcttgttgacccccgcaacaaaactatggatatttatttttttgcctaacggtgtaacaacctgtactggaagcatatccacataccggcatctctttgctttattcgctttttttctttttattaattatgttctccgcagctgtgtccgtgtccatggcagttatgctccccgccctcatggtgatggctgcacacggtatttggatcataaaccaggctgccgcttaacagcgcctccactgcctg

SEQ ID NO: 33568 - DNA, 109 bp, Unknown
  Description of Unknown: RightRegion for integrase B7569 sequence
ttaataaagcatataatacttaaacaagatgaaatttacatagaatggcgaattaagtagccgtttctatgttttttttcgacttttttacgtcccttaatgaaacaac

SEQ ID NO: 33569 - DNA, 260 bp, Unknown
  Description of Unknown: RightRegion for integrase B7570 sequence
agaaaacacaggaataaagggggcgaaaacactgaaaattttacgaatgtcagcgcgtgaccgatagcgtccagcagcggaccggaaacgcgctgcagatagcgctcaatggcatagggcgtgcagctgcacgcgcgggtggggtgcccaaaatagccgcatgggcagggattcatccatacccacaattcgtataaacttgctcaaaatttccaatcaacttcgaatcccccctcggttatcactatcttattcaccag

SEQ ID NO: 33570 - DNA, 115 bp, Unknown
  Description of Unknown: RightRegion for integrase B7571 sequence
ataatcaagcatatcgtgctgaaaaacgatgaaatttacatagaatggcgaataaaatagccatttctatgttttttttacacttttttacgtccctaaatgaaatagctttgta

SEQ ID NO: 33571 - DNA, 260 bp, Unknown
  Description of Unknown: RightRegion for integrase B7572 sequence
ccaccaaaaagctcaacttcgcaagaggttgagcttttttctttttattatacattgtaaggagtagaggagtacgggaatcgaacagcccaggccccgcgtccgcgtcctgcggggcaaaaacagccccgcgggctgtttttagggcgcgggagatggacgggagggtcaccaaagtagtccccaatttcttttacgttttgacgtgtaaccacaatcgtaccaaacttttgaagtaaaaggcaaaacatgcagtatct

SEQ ID NO: 33572 - DNA, 260 bp, Unknown
  Description of Unknown: RightRegion for integrase B7573 sequence
attgaaaaaattcttgttgacccccgcaacaaaactatggatatttatttttttgcctaacggtgtaacaacctgtactggaagcacagggatttcccggccccggtgggcatgactcccagcacgtcccttccttccagaatgctctggatcagcatatcctgcccatccctgaatgtgtcataaccaaaataatgttttaatatttcatattgtgtcatcatcaaactcctctgtattgctccggcataaaagaaccc

SEQ ID NO: 33573 - DNA, 260 bp, Unknown
  Description of Unknown: RightRegion for integrase B7574 sequence
gaacttattaacaaaataagtgttgaaaaagaccatatccatgttgattttaggtactaatttgctatttctacaaagtacgttcatcggtacgccataggtggagaagcgcacatccaggtcggtgttgaagttatcaatggccttgatcaggccgatacaccccacctggaacaggtcgtccacattctccccgcggttggagaatttatggatcaccgacagaaccagccgcagattgccggcgatcagctcttccc

SEQ ID NO: 33574 - DNA, 260 bp, Unknown
  Description of Unknown: RightRegion for integrase B7575 sequence
gtgtgtatgatattctcatctccaacaattatacatacgtgcaaaagaacgaatccctgaagcagatcatcgacaagattatctacgatcgcaagaacgattctcttaaaatctactttttcttatacagataaaatgcccgcaaacccagtaaaatcaagagtttgcgtgtactttataggttataacaatttggttgacccaatggggatccaaatccttaggcgaccagggctattcccctatcgaaattctccgtt

SEQ ID NO: 33575 - DNA, 260 bp, Unknown
  Description of Unknown: RightRegion for integrase B7576 sequence
atcgtggtaaaggacgggcggtacggccacctcgaccttgatgttatttttttgccctaacattgtattagtgtactgtgccgctcggtgccgtccagtctcatgtagaagctgaccgcacaggccgtgccgtcgtcgccctcgtagtcatacatgaacagcgagatgcagtcgttgtacgggtagatattgaagttgtatgcctcgctgtcgtcaatatgctgatccagcacccaatcgctgccgtccagaatcggctc

SEQ ID NO: 33576 - DNA, 109 bp, Unknown
  Description of Unknown: RightRegion for integrase B7577 sequence
attgtggtaaaggacgggcggtacggccattttgaccttgacgttatttttttaccctaacattgtattagtacatcgtgccgcccggaaccggaaaatctatgcttgc

SEQ ID NO: 33577 - DNA, 109 bp, Unknown
  Description of Unknown: RightRegion for integrase B7578 sequence
attgtggtaaaagacgggcggtacggccactacgaccttgacgttatttttttgccctagcattgtattagtgtactgtgccgcccggaaccggaaaatctatgcttgc

SEQ ID NO: 33578 - DNA, 85 bp, Unknown
  Description of Unknown: RightRegion for integrase B7579 sequence
attgtggtaaaagacgggcggtacggccattttgaccttgatgttatttttttaccctaacattgtattagtacatcgtgccgcc

SEQ ID NO: 33579 - DNA, 134 bp, Unknown
  Description of Unknown: RightRegion for integrase B7580 sequence
attgtggtaaaagacgggcggtacggccgttttgaccttgacgttatttttttaccctaacattgtattagtacatcgtgccgccaggtgcgtgcgcttaatacaatgctataaacaggcagagaaaagcccag

SEQ ID NO: 33580 - DNA, 260 bp, Unknown
  Description of Unknown: RightRegion for integrase B7581 sequence
aataaagatgaaatcaatgttaaaactgagaatataaacttaaaaatatttcttaaataaaaaaagctagaaaaaatatctagctttttttattttttaatagtataatattaatacaaataaattttgattataaaaggtgtgaataatattagttcctatctaggcaccactaataaatatagtgtgataattagggggctgttgcaaattaatgatttttaatcattagtttgcaacattttttattttgatgtaaa

SEQ ID NO: 33581 - DNA, 260 bp, Unknown
  Description of Unknown: RightRegion for integrase B7582 sequence
cacctaaagtcggactataccattaactatgttgattttgttcagagtgtctctgtttaaggtgtggatacgtttttccgtatcttacagagaaagtctctgcctaacatgttatccccgtttggagttcacaagttaggcgaagatttaccctcacaaaccgcgtatttccgttattttgaagattttttcttcaaaaatattatcaaaacatatgtttgcttttttcgttatgtttcgtaaaagatgatacaatattt

SEQ ID NO: 33582 - DNA, 122 bp, Unknown
  Description of Unknown: RightRegion for integrase B7583 sequence
cacctaaagccggactataccattaactatgttgattttgttcagagtgtctctgtttaaggtgtggatacgtttttccgtatcttacagagaaagtctctgcctaacatgttatccccgtt

SEQ ID NO: 33583 - DNA, 109 bp, Unknown
  Description of Unknown: RightRegion for integrase B7584 sequence
atcgtggtaaaagacgggcggtacggccactacgaccttgacgttatttttttgccctaacattgtattagtgtactgtgccgcccggaaccggaaaatctatgcttgc

SEQ ID NO: 33584 - DNA, 260 bp, Unknown
  Description of Unknown: RightRegion for integrase B7585 sequence
attgtggtaaaagacgggcggtacggccactacgaccttgacgttatttttttgccctagcattgtattagtgtactgtgccgcccggaaccggaaaatctatgcttgccaagcggctgccgggcattctgccgccgctgacctacgaggaggcgctcgagaccagcgccatctactccgtggccgggctgctgcgcggcggcacggggcttatcaagcagcggcccttccgcagcccgcaccacagcgtcagctcgaca

SEQ ID NO: 33585 - DNA, 260 bp, Unknown
  Description of Unknown: RightRegion for integrase B7586 sequence
atcgtggtaaaggacgggcggtacggccacttcgaccttgatgttatttttttgccctaacattgtattagtacatcgtgccgctcggtgccgtccagcctcatgtagaagctgaccgcacaggccgtaccgtcgtcgccctcgtagtcatacatgaacagcgagatgctgtcgttatacgggtacaggttgaacttatacgcatcgctctcggttatgttctggtcaagcacccagtcgtagccgtccaggataggctc

SEQ ID NO: 33586 - DNA, 260 bp, Unknown
  Description of Unknown: RightRegion for integrase B7587 sequence
tctttcgtgcattccgtcgtggtttatgatgatgagcacatggatatttcatttttgtaaattatttttttgcaaaaatccaccatactaattaatactaaccgttattctgatttacatacttctcccaggcctttgctgcccgctcggcagccgtacttccctcaccggtattcagcgcctggattgcataataattgatcggaatatcgacctctttttcatccagctgcccttccacgatattagctgctgtcacg

SEQ ID NO: 33587 - DNA, 260 bp, Unknown
  Description of Unknown: RightRegion for integrase B7588 sequence
agcattatcgaatcaatttctgtcgatggtcgcaatatctctattcaatggagaatttaatgcaaaattattaaacccatgcatatagataatataaatatgtattatattaacacactttttttgtttaaacaatactttaattacacaaaaaatagcccgcctgccttgattggcaagcgggtaatttttatgtatccattcacattttcggaagattaatatcgttgtccgccagccacccgagtttgattcctctc

SEQ ID NO: 33588 - DNA, 184 bp, Unknown
  Description of Unknown: RightRegion for integrase B7589 sequence
atcgtggtaaaggacgggcggtacggccacttcgaccttgatgttatttttttgccctaacattgtattagtacatcgtgccgctcggtgccgtccagtctcatgtagaagctgaccgcacaggccgtgccgtcgtcgccctcgtagtcatacatgaacagcgagatgctgtcgttatacgggt

SEQ ID NO: 33589 - DNA, 260 bp, Unknown
  Description of Unknown: RightRegion for integrase B7590 sequence
atcgtggtaaaggacgggcggtacggccacttcgaccttgatgttatttttttggcctaacattgtattagtacatcgtgccgctcggtgccgtccagcctcatgtagaagctgaccgcacaggccgtgccgtcgtcgccctcgtagtcatacatgaacagcgagatgcagtcgttgtacgggtagatattgaagttgtatgcttcgctgtcgtcaatatgctgatccagcacccaatcgctgccgtccaggataggctc

SEQ ID NO: 33590 - DNA, 260 bp, Unknown
  Description of Unknown: RightRegion for integrase B7591 sequence
atcgtggtaaaggacgggcggtacggccacttcgaccttgatgttatttttttgccctaacattgtattagtacatcgtgccgctcggtgccgtccagtctcatgtagaagctgaccgcacaggccgtgccgtcgtcgccctcgtagtcatacatgaacagcgagatgcagtcgttgtacgggtagatattgaagttgtatgcttcgctgtcgtcaatattctgatccagcacccaatcgttaccgtccaggataggctc

SEQ ID NO: 33591 - DNA, 260 bp, Unknown
  Description of Unknown: RightRegion for integrase B7592 sequence
atcgtagtaaaggacgggcggtgcggccacttcgaccttgatgttatttttttgccctaacattgtattagtacatcgtgccgctcggtgccgtccagcctcatgtagaagctgaccgcacaggccgtaccgtccgcgccctcgtagtcatacatgaacagcgagatgctgtcgttatacgggtacaggttgaacttatacgcatcgctctcggttatgttctggtcaagcacccagtcgtagccgtccaggataggctc

SEQ ID NO: 33592 - DNA, 260 bp, Unknown
  Description of Unknown: RightRegion for integrase B7593 sequence
atcgtggtaaaagacgggcggtacggccactacgaccttgatgttacttttttgccctaacattgtattagtgtactgtgccgcccggaaccggaaaatctatgcttgccaagcggctgcctggcattctgccgccactgacctacgaggaggcgctcgagaccagcgccatctactccgtggccgggctgctgcgcggcggcacggggcttatcaagcagcggcccttccgcagcccgcaccacagcgtcagctcgaca

SEQ ID NO: 33593 - DNA, 260 bp, Unknown
  Description of Unknown: RightRegion for integrase B7594 sequence
ttgatcaatcatataatgatcaattcaaatggagattttgagattcattggaccttttaggttatgagtgaatatcgtcgatcgccttaccaatatcatgtctcatgtacttattctcaaaagagatccattccgtcgcctcataagctttctttctggcttccttcagatcttttcctgtggcggtcacgccgaggacacgaccgccgttggtgacgatctggccgttttcgttgaattttgtgccagagtggaagaca

SEQ ID NO: 33594 - DNA, 109 bp, Unknown
  Description of Unknown: RightRegion for integrase B7595 sequence
attgtggtaaaggacgggcggtacggccattttgaccttgacgttatttttttaccctaacattgtattagtacatcgtgccgccgggcaccggcaaaagcatgctggc

SEQ ID NO: 33595 - DNA, 260 bp, Unknown
  Description of Unknown: RightRegion for integrase B7596 sequence
atcgtggtaaaagacgggcggtacggccacttcgaccttgatgttatttttttgccctaacattgtattagtacatcgtgccgctcctgaacggaaactcccggaatgctgaatttgcagagtatgcacagaccaaaggctttacctacaatccggtttatttcgattcgactgagaagatggcagaggcccttcagaacggaacggtcgatgccattgtcaccagttccctgcgcaggataaacaacgagcgcatcctt

SEQ ID NO: 33596 - DNA, 260 bp, Unknown
  Description of Unknown: RightRegion for integrase B7597 sequence
attgtggtaaaagacgggcggtacggccattttgaccttgacgttatttttttaccctaacattgtattagtacatcgtgccgcccggaaccggaaaatctatgcttgccaagcggctgccgggcattctgccgccgctgacctacgaggaggcgctcgagaccagcgccatctactccgtggccgggctgctgcgcggcggcacggggcttatcaagcagcggcccttccgcagcccgcaccacagcgtcagctcgaca

SEQ ID NO: 33597 - DNA, 260 bp, Unknown
  Description of Unknown: RightRegion for integrase B7598 sequence
tctgcaattgacactatatatattgatgataactataatctacgtatagtttttatttaaaattgttattggtatatttttttgttgccagaagataatagaaatgtcatttatggtatagttagagattgctacaaagatcctgtaaaagacgctgttgtaaaacttatagaagttgagtgcaaaatgggaaaagacattagaaaacctgtttctcacacatttactgatgaaaatggagaattcgtatttggaccact

SEQ ID NO: 33598 - DNA, 260 bp, Unknown
  Description of Unknown: RightRegion for integrase B7599 sequence
tctgcaattgacactatatatattgatgataactataatctacgtatagtttttatttaaaattgttattggtatatttttttgttaccagaagataatagaaatgttatttatggtatagttagagattgctacaaagatcctgtaaaagacgctgttgtaaaacttatagaagttgagtgcaaaatgggaaaagacattagaaaacctgtttctcacacatttactgatgaaaatggagaattcgtattcggaccact

SEQ ID NO: 33599 - DNA, 109 bp, Unknown
  Description of Unknown: RightRegion for integrase B7600 sequence
atcgtggtaaaagacgggcggtacggccactacgaccttgatgttatttttttaccctagcattgtattagtgtactgtgccgcccggaaccggaaaatctatgcttgc

SEQ ID NO: 33600 - DNA, 260 bp, Unknown
  Description of Unknown: RightRegion for integrase B7601 sequence
atcgtggtaaaggacgggcgatacggccacttcgaccttgatgttatttttttgccctaacattgtattagtacatcgtgccgctcggtgccgtccagcctcatgtagaagctgaccgcacaggccgtaccgtcgtcgccctcgtagtcatacatgaacagcgagatgctgtcgttatacgggtacaggttgaacttatacgcatcgctctcggttatgttctggtcaagcacccagtcgtagccgtccaggataggctc

SEQ ID NO: 33601 - DNA, 260 bp, Unknown
  Description of Unknown: RightRegion for integrase B7602 sequence
tctgcaattgacactatatatattgatgataactataatctacgtatagtttttatttaaaattgttattggtatatttttttgttgccagaagataatagaaatgttatttatggtatagttagagattgctacaaagatcctgtaaaagacgctgttgtaaaacttatagaagttgagtgcaaaatgggaaaagacattagaaaacctgtctctcacacatttactgatgaaaatggagaattcgtattcggaccact

SEQ ID NO: 33602 - DNA, 260 bp, Unknown
  Description of Unknown: RightRegion for integrase B7603 sequence
gaccatattgaacaagattttgataatattaatgataattggttagttttttttaaataatttcgagtgcataacactaggtgtccttgagttaaaactaaataatctatttttttaatacctactgatttaaagtatggaataagtatattcttagatatatcataattaatatttcctcccgtatcaattaatatatttttattttttaatctaataagagatgagtcaccttgcccaacatctaaaatacttacttc

SEQ ID NO: 33603 - DNA, 260 bp, Unknown
  Description of Unknown: RightRegion for integrase B7604 sequence
attgtggtaaaggacgggcggtacggccattttgaccttgacgttatttttttaccctaacattgtattagtacatcgtgccgcccggatccgggaaaacgacattgggaattgaactgatccgcaggatgaacggaaaagcactgattttggcaccatccattacgatccgggagcagtggatcgcaaggattgaggaagcttttttatgtgagggcatacagggggaagattatctttcacagaatttaaaacagcca

SEQ ID NO: 33604 - DNA, 260 bp, Unknown
  Description of Unknown: RightRegion for integrase B7605 sequence
cacctaaagccggactataccattaactatgttgattttgttcagagtgtctctgtttaaggtgtggatacgttttttcgtatcttacagagaaagtctctgcctaacatgttatccccgtttggcgctgacaaaacaatgaccgccgttctttccaaccaggcagatatcggattcatgggctctgagtcctccatctacacgtataatgagggcgcaaacgattatgtggtgaatttcgcacagcttacccaacgtgc

SEQ ID NO: 33605 - DNA, 260 bp, Unknown
  Description of Unknown: RightRegion for integrase B7606 sequence
atcgtggtaaaggacgggcggtacggccacttcgaccttgatgttatttttttgccctaacattgtattagtacatcgtgccgctcggtgccgtccagcctcatgtagaagctgaccgcacaggccgtaccgtcgtcgccctcgtagtcatacatgaacaacgagatgctgtcgttatacgggtacaggttgaacttatacgcatcgctctcggttatgttctggtcaagcacccagtcgtagccgtccaggataggctc

SEQ ID NO: 33606 - DNA, 260 bp, Unknown; identical to SEQ ID NO: 33601
  Description of Unknown: RightRegion for integrase B7607 sequence

SEQ ID NO: 33607 - DNA, 260 bp, Unknown
  Description of Unknown: RightRegion for integrase B7608 sequence
attgtggtaaaagacgggcggtacggccattttgaccttgacgttatttttttaccctaacattgtattagtacatcgtgccgccgggcacgggcaaaagcatgctggccaagcgcctgccgggcatcctgccgccgctgacctatgaggaagcgctggagaccagcgccatctactcggtggccgggctgctgcctgcgggcagcgggcttttgaaagagcggcccttccgtagcccgcaccacagcgtaagcaccgcc

SEQ ID NO: 33608 - DNA, 260 bp, Unknown
  Description of Unknown: RightRegion for integrase B7609 sequence
tccgtaattgatactatatatattgatgataactataatctacgtatagtttttatttagatttgtgattggtatatttttttgttgccagaagataatagaaatgttatttatggtatagttagagattgttacaaagatcctgtaaaagacgctgttgtaaaacttatagaagttgagtgtaaaatgggaaaagatattagaaaacctgtttctcacacatttactgatgacaatggagaattcgtattcggaccact

SEQ ID NO: 33609 - DNA, 260 bp, Unknown
  Description of Unknown: RightRegion for integrase B7610 sequence
attgtggtaaaggacgggcggtacggccattttgaccttgacgttatttttttaccctaacattgtattagtacatcgtgccgcccggttcgtgtgcttaatacaatgttataaataggtacggaaaagcccaggcgcacagcctgggctttgttgtttcgtccgtgctgtaccgctaaagcggtacaaaaatgcagggcaaagtttgtgcagcttgcctattgaaagtgtaccgctaaagcggtacaatataattaccg

SEQ ID NO: 33610 - DNA, 260 bp, Unknown
  Description of Unknown: RightRegion for integrase B7611 sequence
atcgtggtaaaggacgggcggtacggccacatcgaccttgatgttatttttttgccctaacattgtattagtacatcgtgccgctcggtgccgtccagtctcatgtagaagctgaccgcacaggccgtgccgtcgtcgccctcgtagtcatacatgaacagcgagatgcagtcgttgtacgggtagatattgaagttgtatgcctcgctgtcgtcaatatgctgatccagcacccaatcgctgccgtccagaatcggctc

SEQ ID NO: 33611 - DNA, 136 bp, Unknown
  Description of Unknown: RightRegion for integrase B7612 sequence
attgtggtaaaagacgggcggtacggccattttgacctcgacgttatttttttaccctaacattgtattagtacatcgtgccgccggttccatcaaactgcagggcagcgtgaccgccgttaccaccatccccagc

SEQ ID NO: 33612 - DNA, 260 bp, Unknown
  Description of Unknown: RightRegion for integrase B7613 sequence
cacctaaagtcggactataccattaactatattgattttgttcagagtgtctctgtttaaggtgtggatacgtttttccgtatcttacagagaaagtctctgcctaacatgttatccccgtttggcgctgacaaaacaatgaccgccgttctttccaaccaggcagatatcggattcatgggctctgagtcctccatctacacgtataatgagggcgcaaacgattatgtggtgaatttcgcacagcttacccaacgtgc

SEQ ID NO: 33613 - DNA, 183 bp, Unknown
  Description of Unknown: RightRegion for integrase B7614 sequence
attgtggtaaaggacgggcggtacggccattttgaccttgacgttatttttttaccctaacattgtattagtacatcgtgccgcccggaaccggaaaatctatgcttgccaagcggctgccgggcattttgccgccgctgacctatgaggaggcgctcgagaccagcgccatctactccgtgg

SEQ ID NO: 33614 - DNA, 260 bp, Unknown
  Description of Unknown: RightRegion for integrase B7615 sequence
acatttatccataaaattcttatatatagggataggtgggaggttgttttctatatatagcggttttatatacacccaaaattgataggtgcatgaccgccgatgttatttgtctgttgtttgccgtttgacacagaatcatctcctttcataaatatttattatagcataagggagtaaatttagcaaaacggtttttgttatagtctgctgcgcaatcgaaatttgtatcataggaggtaaaaaacatgaagaaaatc

SEQ ID NO: 33615 - DNA, 260 bp, Unknown
  Description of Unknown: RightRegion for integrase B7616 sequence
agcctcatatcccgaattgtcctgaccgacgaccaagttgatattgagtgggcgttttagcgcaaaagaaaaagccctcccgcgcaggaataatcctgcacgggagggctttttggctcacttagtttcggtgctcagctgagataccgcgatggtagcggcggtggcagccgcagtgctggcagccacttcggtggctccgctggtggaagacgggagcgcaatcttctgacggcgcacctcggcttcaattttagtcg

SEQ ID NO: 33616 - DNA, 260 bp, Unknown
  Description of Unknown: RightRegion for integrase B7617 sequence
agcctcatatcccgcattgtcctgaccgacgaccaagttgatattgagtgggcgttttagcacaaaagaaaaagccctcctgcacaggaacaatcctgcacgggagggcttttggcttacttggtttcggcgttcagctgagatactgcgatagtggcggcggtggcagccgcagtgctggcagccacttcggtggcgccgctggtagcggacgggagcgcaatcttctgacggcgcacctcggcttcaattttagttgt

SEQ ID NO: 33617 - DNA, 260 bp, Unknown
  Description of Unknown: RightRegion for integrase B7618 sequence
caattgatcaaatacatatctgtaaacgctgattctatcagcatacactggaggttttaattttttttatatttttatctaacttttatcattcatttcaccgatcagttgttctaatttcataaacaccccttataaatattttaccttttacaagtgcccaacactacttctaattattttatcatagggctatttacaagtaaactttaccattctatcgttcctttaatatgtgcgataaaatatattcaaaaagg

SEQ ID NO: 33618 - DNA, 109 bp, Unknown
  Description of Unknown: RightRegion for integrase B7619 sequence
acatttatccataaaattcttatatatagggataggtgggaggttgttttctatatatagcggttttatatacacccaaaattgataggtgcatgaccgccgatgttag

SEQ ID NO: 33619 - DNA, 260 bp, Unknown
  Description of Unknown: RightRegion for integrase B7620 sequence
agcctcatatcccgcattgtcctgaccgacgaccaagttgatattgagtgggcgttttagcgcaaaaaaagaaaaagccctcccatgcaggaacaatcctgcatgggagggctcttggcttactttgtttcggcgttcagctgagataccgcgattgtggcagcagtggcagccgcagtgctggcagccacttcggtggcgccgccggtagaggacgggagcgcaatcttctgacggcgcacctcggcttcaattttagt

SEQ ID NO: 33620 - DNA, 109 bp, Unknown
  Description of Unknown: RightRegion for integrase B7621 sequence
acatttatccataaaattctcatatatagggataaatgggaggttgttttctatatatagtggttttatatacacccaaaattgataggtgcatgaccgccgatattgg

SEQ ID NO: 33621 - DNA, 260 bp, Unknown
  Description of Unknown: RightRegion for integrase B7622 sequence
acatttatccataaaattctcatatatagggataaatgggaggttgttttctatatctagtggtttttatatacacctaaaacagataggtggatgaccgccgatgttatttgtctgttgtttgccatttgacacagaatcatctcctttaataaataattcattataccatacgggagtaaatttagcaaaacggtttttgttatagtctgctgcgcaatcgaaatttgtatcataggaggtaaaaaacatgaagaaaa

SEQ ID NO: 33622 - DNA, 260 bp, Unknown
  Description of Unknown: RightRegion for integrase B7623 sequence
agcctcgtgaaccgcatcatcgtgacagatgacaaggtggacatcgaatggtctttttgagcatacaaaaagagcctcggccaatgaaggtcgaggctctttcattcggcgtgctgggattcacgcctctgccgtctgagcgacagtcttgccgagagctgtcttcgtgatgtacacgagcccttcgagcacaagcggcaggacgatgccgtcgcggattttgcaccagcccgtctcggttttcgcctgctctttcgtag

SEQ ID NO: 33623 - DNA, 260 bp, Unknown
  Description of Unknown: RightRegion for integrase B7624 sequence
caactgataaaatacatatctgtaaacgctgattatatcagcattcactggcggttttaattttttttcatattttatctaacttttatcattcatttcaccgatcagttgttctaatttcataaacaccccttataaatattttaccttttacaagtgcccaacactacttctaattattttatcatagggctatttacaagtaaactttaccattctatcgttcctttaatatgtgcgataaaatatattcaaaaagg

SEQ ID NO: 33624 - DNA, 260 bp, Unknown
  Description of Unknown: RightRegion for integrase B7625 sequence
gatgttgaagcatatcgtgtaggaaaagaagattttataaaaatagaattagtaaaataagtatatacacaactatactttaccatttccacagcaggtataaagcattacaggtcttgtattacatactatacaattagttcctcctccaagcactggtctatcgcaagtttgtaaacagttatctggacatgcattttcttgtaatactaaaatgacacatagtatttcattaatgcaatttccgttgctgtttgaat

SEQ ID NO: 33625 - DNA, 260 bp, Unknown
  Description of Unknown: RightRegion for integrase B7626 sequence
agcctcgtatctcgcatcgtcctcaccgacgaccaagttgatattgagtgggcattttagcgcaaaagaaaaaagccctcccgcgcaggataattcctacgtgggagggcttttaagttacttcttttcagtgccgagctgggaaacggtgatgcttgcggcggtagccgcggcagtgctggttgccacctccgtggcgccgtttgcggtagcaggcagggtaatcttctgcttacgcacctctgcctcaattttggttg

SEQ ID NO: 33626 - DNA, 260 bp, Unknown; identical to SEQ ID NO: 33616
  Description of Unknown: RightRegion for integrase B7627 sequence

SEQ ID NO: 33627 - DNA, 260 bp, Unknown
  Description of Unknown: RightRegion for integrase B7628 sequence
agcctcatatcccgcattgtcctgaccgacgaccaagttgatattgagtgggcgttttagcgcaaaagaaaaagccctcccgcacaggaacaatcctgcacgggagggcttttggcttatttagtttcggcgctcagctgagataccgcgatggtagcggcggtggcagccgcagtgctggcagccacttcggtggctccgctggtggaagacgggagcgcaatcttctgacggcgcacctcggcttcaattttagtcgt

SEQ ID NO: 33628 - DNA, 260 bp, Unknown
  Description of Unknown: RightRegion for integrase B7629 sequence
caactgataaaatacatatctgtaaacgctgattctatcagcattcactggcggttttaattttttttcatattttatctaacttttattattcatttcagcaaatagtaaaagttagataaaaaagaaggggcagctttttggctgtccctaacttttaaaattcatcgatcatcgggcaatcgtgatgatccatcttctttagatcatctatgctcacatagtactttatgagcgcgtatgcaatgtctctttttccc

SEQ ID NO: 33629 - DNA, 260 bp, Unknown
  Description of Unknown: RightRegion for integrase B7630 sequence
gtcattaaagaaataagaattgataatgaccagaatatcacgggtgttgtttttgggtagtgttgtactaattgaacactacccgtcggttcatctgccagtaaaatagcaggttttgccgctaatgctcttgcgattgccaccctttgctgctgaccccctgacagtgcacttggaagattttccagttttgtccgaatacccagtgtatctatgatttcatttacataacctttttcaatcttttttccatccagttt

SEQ ID NO: 33630 - DNA, 260 bp, Unknown
  Description of Unknown: RightRegion for integrase B7631 sequence
gcagctatgaaagatgaaatttttgtgaaaaaaatagttactatgtccaacaagctgtagacttgctcgttgaccatgtaaccatcaccgataaagtgctgaaaatcaccttatcaacgcaaaatgtttgcgcttatttggtgccgcggaccggaatcgaaccggtacgggtatcactacccgagggattttaagtcccttgcgtctgccagttccgccaccgcggcagacataactacttaacaccttttaagaaataa

SEQ ID NO: 33631 - DNA, 260 bp, Unknown
  Description of Unknown: RightRegion for integrase B7632 sequence
agcctcatatcccgcattgtcctgaccgacgaccaagttgatattgagtgggcgttttagcgcaaaagaaaaagccctcccgcgcaggattattcctgtgcgggagggcttttggcttatttagtttcggcgctcagctgagataccgcgatggtagcggcggtggcagccgcagtgctggcagccacttcggtggctccgcttgtggaagacgggagcgcaatcttctggcggcgcacctcggcttcaattttagtcgt

SEQ ID NO: 33632 - DNA, 148 bp, Unknown
  Description of Unknown: RightRegion for integrase B7633 sequence
atcatagaggagatctatatagacgggactgaggtaaccgggattaagccccggatttaatcttacccgtatggtggactaagttgcacactctgtactcacccccgcgccgccgaaaaagacgatgcggttactctcctgcacccat

SEQ ID NO: 33633 - DNA, 138 bp, Unknown
  Description of Unknown: RightRegion for integrase B7634 sequence
cagctgatcaaatatatatctgtaaacgctgattctatcagcatacactggaggttttaattttttttcttcctcaggcatggaaaactccttgtaccgcggcgagcatattctggtaaataaatggagctatgggtt

SEQ ID NO: 33634 - DNA, 260 bp, Unknown
  Description of Unknown: RightRegion for integrase B7635 sequence
gctgttaaagaggtcgttttgaatactgctaaacgtcgatgtaacttttcacaacggtaaggtaattgacctaccaataacagaagacccctcggaggatgttacagaggctatacagtcgctttctgaagtcactgagaggggtttaatagatgttgatgaggttatcatatagttgagattctatcgtcagtagcgcttgttaggattcacagaaaacttccgtaaagcattacccgacttaagcacctttgaagctt

SEQ ID NO: 33635 - DNA, 260 bp, Unknown
  Description of Unknown: RightRegion for integrase B7636 sequence
caactgataaaatacatatctgtaaacgctgattctatcagcattcactggcggttttaattttttttcatattttatctaacttttatcattcatttcagcaaatagtaaaagttagataaaaaagaaggggcagcttttcggctgtccctaacttttaaaattcatcgatcatcgggcaatcgtgatgatccatctcttttagatcatctatgctcacatagtactttatgagcgcgtatgcaatgtctctttttcct

SEQ ID NO: 33636 - DNA, 260 bp, Unknown
  Description of Unknown: RightRegion for integrase B7637 sequence
aaatatatagaatatattatatataacgaagatggaacttacgaaataaagttcaaataattattattatagcactaacaatatgaaccattttctgctttggactatgttacgagacttgccctttctgatgatttatataaaattattaaaaatgagggtaaaactgctattttagtaacacatgatttagcagaagctatttctttatctgatagagtagttgtgttaacaaaaagaccggccacagttaaaaagat

SEQ ID NO: 33637 - DNA, 109 bp, Unknown
  Description of Unknown: RightRegion for integrase B7638 sequence
acatttatccataaaattctcatatatagggataaatgggaggttgttttctatatctagtggtttttatatacacctaaaacagataggtggatgaccgccgatattg

SEQ ID NO: 33638 - DNA, 260 bp, Unknown
  Description of Unknown: RightRegion for integrase B7639 sequence
atcatagaggagatctatatagacgggactgaggtaaccgggattaagccccggatttaatcttacccgtatggtggactaagttgcacactctgtactcactcccgcgccgccgaaaaagacgatgcggttactctcctgcacccatgttttcagagtttccagcttgttcacggtcttccgcctccatttccttcagcagcttcttgtcctgcttcgacgataaatccagctgtgcatacatgtccggccgccgcgcc

SEQ ID NO: 33639 - DNA, 260 bp, Unknown
  Description of Unknown: RightRegion for integrase B7640 sequence
agcctcatatcccgcattgtcctgaccgacgaccaagttgatattgagtgggcgttttagcgcaaaaaagaaaaagccctcccatgcaggaacaatcctgcatgggagggctcttggcttactttgtttcggcgttcagctgagataccgcgatggtggcagcagtggcgccgccggtagaggacgggagcgcaatcttctgacggcgcacctcggcttcaattttagtcgtcaggtactcggtgaggtcgccatacagg

SEQ ID NO: 33640 - DNA, 260 bp, Unknown
  Description of Unknown: RightRegion for integrase B7641 sequence
agcctcgtatcccgcatagtcctcaccgacgaccaagttgatattgagtgggcattttagcgcaaaagaaaaaagccctcccgcgcaggataattcctgaactgccccagcttgtgcagacagcacaaaaaagccccgggtgtaggaatattcagttttaacaggagtagcgcagcgttagcggcgccactcctgttttgctttggatacgctcatagttgtaaaaatggatatagcgatcaatcatttcatttgcctcg

SEQ ID NO: 33641 - DNA, 260 bp, Unknown
  Description of Unknown: RightRegion for integrase B7642 sequence
atcatagaggagatctatatagacgggactgaggtaaccgggattaagccccggatttaatcttacccgtatggtggactaagttgcacactctgtactcactcccgcgccgccgaaaaagacgatgcggttactctcctgcacccatgttttcagagtttccagcttgttcacggtcttccgcctccatttccttcagcagcttcttatcctgcttcgacgataaatccagctgttcgtacatatccggccgccgggca

SEQ ID NO: 33642 - DNA, 260 bp, Unknown
  Description of Unknown: RightRegion for integrase B7643 sequence
gatatagcgtgcgtggctccaccacaagtcaaaaaatccgaacattatcatcaatggtgatacgttcggatttttgatttttatgagtttttataatttagaaattactatggtttgtagcatattctcggcctcctccaagccttgcatcacttccgccatgatgcgagtggccaagataaatcctgaactgaacgcttcacactcagtgatgcagaacagttcacttgtgcagtccttgaatttttcaaaggtttctt

SEQ ID NO: 33643 - DNA, 141 bp, Unknown
  Description of Unknown: RightRegion for integrase B7644 sequence
agcctcatatcccgcattgtcctgaccgacgaccaagttgatattgagtgggcgttttagcgcaaaagaaaaagccctcccacgcaggattattcctgtctcttatacacatctccgagcccacgagaccgaggctgatct

SEQ ID NO: 33644 - DNA, 260 bp, Unknown
  Description of Unknown: RightRegion for integrase B7645 sequence
agccttgtgtcccgcattgtgctcaccgacgatgacgtcaagattgagtgggccttctgacagcaacgaaaaaagccctaccgctgcgtgagcggtagggctttcctgttacttctctgaagactgcgcgattgcgttctgcacaacggcggctgcggtcgcagcagcagtgctggcggcaaccgatgtagcattcgcagagctggcgctttccagtgccgcagcagcaggcagcgccttctgcttgcgtacctcggcct

SEQ ID NO: 33645 - DNA, 260 bp, Unknown
  Description of Unknown: RightRegion for integrase B7646 sequence
agcctcgtgtcccgtatcgtcctcaccgacgatgacgtcaagattgagtgggccttctgatggcaataaaaaaaaagccctgccgctgcgtgagcggtagggctttcctgttacttctccgaagtctgcgtaatcgcgttctgcacgacggctgcggcagtcgcagcagcggtgctggcggccaccgtggtggagctggcgctttccagagcagcggcagcagtcgaggtgctgagtttctgccggcgtaccgcagcctc

SEQ ID NO: 33646 - DNA, 260 bp, Unknown
  Description of Unknown: RightRegion for integrase B7647 sequence
agcctcgtgtcccgcattgtgctcaccgacgatgccgtcaagattgagtgggccttctgatggcaaacaaaaaaagccctaccgctgcgtgagcggtagggctttcctgttacttctctgaagactgcgcgattgcattctgtacaacagcagctgcggtcgcagcggcagtgctggcagcaaccgatgttgcattcgcagagctggcgctttccagtgccgcagtagcggcgggcagcgccttctgcttgcgtacctcg

SEQ ID NO: 33647 - DNA, 109 bp, Unknown
  Description of Unknown: RightRegion for integrase B7648 sequence
attgaaaagattgaggttatcgataatgaaataactatatatttttatgtgtccatttaagcaatcacttgcatatttgctgggtgccgtagaatccaagcagatgcga

SEQ ID NO: 33648 - DNA, 260 bp, Unknown
  Description of Unknown: RightRegion for integrase B7649 sequence
agcctcgtgtcccgcattgtgctcaccgatgatgacgtcaagattgagtgggccttctgatggcaaacaaaaaaaaagccctaccgctgcgtgagcggtagggctttcctgttacttctctgaagactgcgcgattgcattctgtacaacagcagctgcggtcgcagcggcagtgctggcagcaaccgatgttgcattcgcagagctggcgctttccagtgccgcagtagcggcgggcagcgccttctgcttgcgtacct

SEQ ID NO: 33649 - DNA, 260 bp, Unknown
  Description of Unknown: RightRegion for integrase B7650 sequence
agccttgtgtcccgcattgtgctcaccgacgatgacgtcaagattgagtgggccttctgacagcaacgaaaaaagccctaccgctgcgtgagcggtagggctttcctgttacttctctgaagactgcgcgattgcgttctgcacaacggcggctgcggtcgcagcagcagtgctggcggcaaccgatgtagcattcgcagagctggcgctttccagtgccgcagtagcggcgggcagcgccttctgcttgcgtacctcgg

SEQ ID NO: 33650 - DNA, 260 bp, Unknown; identical to SEQ ID NO: 33644
  Description of Unknown: RightRegion for integrase B7651 sequence

SEQ ID NO: 33651 - DNA, 260 bp, Unknown; identical to SEQ ID NO: 33649
  Description of Unknown: RightRegion for integrase B7652 sequence

SEQ ID NO: 33652 - DNA, 260 bp, Unknown
  Description of Unknown: RightRegion for integrase B7653 sequence
agtctcatatctcgtatcgtcctcaccgacgatgacgtcgagattgagtgggcgttctgatggcaaacaaaaaaaagccctaccgctgcgtgagcggtagggctttcctgttacttctctgaagactgcgcgattgcattctgtacaacagcagctgcggtcgcagcggcagtgctggcagcaaccgatgttgcattcgcagagctggcgctttcgagtgccgcagtagcggcgggcagcgccttctgcttgcgtaccgc

SEQ ID NO: 33653 - DNA, 260 bp, Unknown
  Description of Unknown: RightRegion for integrase B7654 sequence
ggtttaataaatagaatatatttagacgggaataagatatctcatgttgattttaattgaataaagtatggctttcgatggtgtcatttgtagatgcgggtcgtaaagccatacttttttaatgttcattttgtatacataatcgtatataatacctaaaaggagatgaacaatatgacaaataaagattcaataaataaaatattatctagattagaaagcgtaaggaatgaaatagagtcaattaggcgcgacttaaa

SEQ ID NO: 33654 - DNA, 260 bp, Unknown
  Description of Unknown: RightRegion for integrase B7655 sequence
agccttgtgtcccgcattgtgctcaccgacgatgacgtccagattgagtgggccttctgacagcaacgaaaaaagccctaccgctcacgtgagcggtagggctttcctgttacttttctgaagactgcgcgattgcgttctgcacaacggcggctgcggtcgcagcagcagtgctggcggcaaccgatgtagcattcgcagagctggcgctttccagtgccgcagtagcggcgggcagcaccttctgcttgcgtacctcg

SEQ ID NO: 33655 - DNA, 260 bp, Unknown
  Description of Unknown: RightRegion for integrase B7656 sequence
gggttaataaacagaatatatttagacgggaataagatatcttatgttgattttaattgaataaagtatggctttcgatggtgtcatttgtagatgcaggtcgtaaagccatacttttttaatgttcattttgtatacataatcgtatataatacttaaaaggagatgagtaatatgacaaataaagattcaataaataaaatattatctagattagaaagcgtaaggaatgaaatagagtcaattaggcgcgacttaaa

SEQ ID NO: 33656 - DNA, 260 bp, Unknown
  Description of Unknown: RightRegion for integrase B7657 sequence
agcctcgtttcccgcataattcttaccgatgatgacgtaaaaatcgagtgggccttctgatggcaataaaaaaagccctgccgctgcatgagcggtagggctttcctgttacttctccgaagttttcgcaatcgcgttctgcacgacggccgcggcagtcgcagcggcggtgctggcggcgacggtggtggtctctgctgcgtcctccttcgaggccgtagtggacgcgggcagggccttcttctgcttgcgtacctcgg

SEQ ID NO: 33657 - DNA, 260 bp, Unknown
  Description of Unknown: RightRegion for integrase B7658 sequence
ggtttaataaatagaatatatttagacgggaataagatatctcatgttgattttaattgaataaagtatggctttcgatggtgtcatttgtagatgcgggtcgtaaagccatacttttttaatgttcattttgtatacataatcgtatataatacttaaaaggagatgagtaatatgacaaataaagattcaataaataaaatattatatagattagaaagcgtaaggaatgaaatagagtcaattaggcgcgacttaaa

SEQ ID NO: 33658 - DNA, 260 bp, Unknown
  Description of Unknown: RightRegion for integrase B7659 sequence
agccttgtgtcccgcattgtgctcaccgacgacgacgtcaagattgagtgggccttctgacggcaaacaaaaaaaaagccctaccgctgcgtgagcggtagggctttcctgttacttctctgaagactgcgcgattgcgttctgcacaacggcggctgcggtcgcagcagcagtgctggcggcaaccgatgtagcattcgcagagctggcgctttccagtgccgcagtagcggcgggcagcaccttctgcttgcgtacct

SEQ ID NO: 33659 - DNA, 260 bp, Unknown
  Description of Unknown: RightRegion for integrase B7660 sequence
attgaccgcatagaggtggatgaggaaaatgtgtatttctcctggtcatttgcggactgataggggaatgtttgttcctctttgagtatataccactatcaagatatctgtctttacacaaaatttaatcgtttagtatttttcttacaaataaaaagggctggaattttagttcctgcccttttctgcccttttgatttcctcatgctttttcatgacaaaatccttgaatgcctgatttgcatagcgtttcttgtctc

SEQ ID NO: 33660 - DNA, 260 bp, Unknown
  Description of Unknown: RightRegion for integrase B7661 sequence
agccttgtgtcccgcattgtgctcaccgacgatgacgtcaagattgagtgggccttctgacggcaaacaaaaaaaaagccctaccgctgcgtgagcggtagggctttcctgttacttctctgaagactgcgcgattgcattctgtacaacagcagctgcggtcgcagcggcagtgctggcagcaaccgatgttgcatttgcagagctggcgctttccagtgccgcagtagcggcgggcagcgccttctgcttgcgtacct

SEQ ID NO: 33661 - DNA, 260 bp, Unknown
  Description of Unknown: RightRegion for integrase B7662 sequence
aattacattgattatataatacaagatgatgtaaatgagttcaaaattatttttaaataggaaattcgtgtgaatactaattatacagctccgtttggaccaataaagccaaaaacctcgcctttttctaacgatagtgaaaggttttctacacctaaaactttatcataatactttgttaaattttttatttctaatacttttttcataaagactccttattttctagttcatagatattatatcatggatttgatatt

SEQ ID NO: 33662 - DNA, 260 bp, Unknown
  Description of Unknown: RightRegion for integrase B7663 sequence
agcctcatctcccgcatcgtcctcaccgacgatgacgtcaagattgagtgggccttctgacagcaacgaaaaaagccctaccgctgcgtgagcggtagggctttcttgttacttctctgaagactgcgcgattgcgttctgcacaacggcggctgcggtcgcagcagcagtgctggcggcaaccgatgtagcattcgcagagctggcgctttccagtgccgcagtagcggcgggcagcaccttctgcttgcgtacctcgg

SEQ ID NO: 33663 - DNA, 260 bp, Unknown
  Description of Unknown: RightRegion for integrase B7664 sequence
agccttgtgtcccgcattgtgctcaccgacgatgacgtcaagattgagtgggccttctgacagcaacgaaaaaagccctaccgctgcgtgagcggtagggctttcctgttacttctctgaagacttcgcgattgcgttctgcacaacggcggctgcggtcgcagcagcagtgctggcggcaaccgatgtagcattcgcagagctggcgctttccagtgccgcagtagcggcgggcagcgccttctgcttgcgtacctcgg

SEQ ID NO: 33664 - DNA, 260 bp, Unknown
  Description of Unknown: RightRegion for integrase B7665 sequence
agcctcgtgtcccgcattgtgctcaccgacgatgacgtcaagattgagtgggccttctgatggcaaacaaaaaaagccctaccgctgcgtgagcggtagggctttcctgttacttctctgaagtctgcgtaatcgcgttctgcacaacggctgcggcagtcgcagcggcggtgctggcggcaaccgttgtggagctggcgctttccagagcagcggcagcagtcgaggtgctgagtttctgccggcgtaccgcagcctca

SEQ ID NO: 33665 - DNA, 260 bp, Unknown
  Description of Unknown: RightRegion for integrase B7666 sequence
agccttgtgtcccgcattgtgctcaccgacgatgacgtccagattgagtgggccttctgacagcaacgaaaaaagccctaccgctcacgtgagcggtagggctttcctgttacttttctgaagactgcgcgattgcgttctgcacaacggcggcttcggtcgcagcagcagtgctggcggcaatcgatgtagcattcgcagagctggcgctttccagtgccgcagtagcggcgggcagcaccttctgcttgcgtacctcg

SEQ ID NO: 33666 - DNA, 260 bp, Unknown; identical to SEQ ID NO: 33644
  Description of Unknown: RightRegion for integrase B7667 sequence

SEQ ID NO: 33667 - DNA, 260 bp, Unknown
  Description of Unknown: RightRegion for integrase B7668 sequence
agcctcatctcccgcattgtgctcaccgacgatgacgtcaagattgagtgggccttctgataacaacaaaaaaaagccctaccgctgcgtgagcggtagggctttcttgcttatgcgggagctgcctcggaactgattttctggacggcgttctgcacgacggcagcggcagtcgcagcggcctggcggcgcgtgaagacatagccgaagagcttcatcacccacaccagcagaaccagcacgaggaacacgaggcagat

SEQ ID NO: 33668 - DNA, 260 bp, Unknown; identical to SEQ ID NO: 33649
  Description of Unknown: RightRegion for integrase B7669 sequence

SEQ ID NO: 33669 - DNA, 260 bp, Unknown
  Description of Unknown: RightRegion for integrase B7670 sequence
agcctcgtgtcccgcattgtgctcaccgacgatgacgtcaagattgagtgggccttctgacagcaacgaaaaaagccctaccgctgcgtgagcggtagggctttcctgttacttctctgaagactgcgcgattgcgttctgcacaacggcggctgcggtcgcagcagcagtgctggcggcaaccgatgtagcattcgcagagctggcgctttccagtgccgcagtagcggcgggcagcgccttctgcttgcgtacctcgg

SEQ ID NO: 33670 - DNA, 260 bp, Unknown
  Description of Unknown: RightRegion for integrase B7671 sequence
agtttaatacaagctgtcaacgtggacggtcagcaagtatcggttgtttggaggatttgattttacaaaattatacgcactatgcacatagtatatataattttgtatttacaaataaaaaattggggagtggttgcaattgccactcccaataaattaatattctgcaaaagcgtcttgtatcgcttcgtatatgtgaacaggatcgagtttaaattttgtaaatctgtcaactatactttttacaaaatagtaatctg

SEQ ID NO: 33671 - DNA, 260 bp, Unknown
  Description of Unknown: RightRegion for integrase B7672 sequence
agtctcgtgtcccgcattgtgctcaccgacgatgacgtcaagattgagtgggccttctgatggtaaacaaaaaaaaagccctaccgctgcgtgagcggtagggctttcctgttacttctctgaagactgcgcgattgcattctgtacaacagcagctgcggtcgcagcggcagtgctggcagcaaccgatgttgcattcgcagagttggcgctttccagtgccgcagtggcggcgggcagcgccttctgtttgcgtacct

SEQ ID NO: 33672 - DNA, 260 bp, Unknown
  Description of Unknown: RightRegion for integrase B7673 sequence
ctgattgacaaaatattgatagacgacgatgcaatcaatatcattttgcgaaaaatatgatttacaagtttacaaagcccatgcacatggtcagtgcctgttttccgcaggcggcacaccgtttgaagcaccggtccaggttaaatgcaactcttggaaggtaaccgaagtcttccagcagcgtaaacaacgggaaaaagattgccattggaggcagcataaccgatattacccatgccagaacccggtaaacgccatga

SEQ ID NO: 33673 - DNA, 70 bp, Unknown
  Description of Unknown: RightRegion for integrase B7674 sequence
gtcattaaagaaattagaattgataatgaccagaatatcacgggtgttgtttttgggtagtgttgtacta

SEQ ID NO: 33674 - DNA, 90 bp, Unknown
  Description of Unknown: RightRegion for integrase B7675 sequence
ctgattgacaaaatattaatagacgacgatgcaatcaatatcattttgcgaaaaatatgatttacaagtttacaaagcccatgcacatgg

SEQ ID NO: 33675 - DNA, 260 bp, Unknown
  Description of Unknown: RightRegion for integrase B7676 sequence
gtcattaaagaaattagaattgataatgaccagaatatcacgggtgttgtttttgggtagtgttgtactaatgtgacactacccgtcggttcatcagctaaaatcagtttcggttcattgattaaggctctagcacaagcacaacgctgtttttgtccgccagaaacttcataaggaaatttcgataaaatatcacgaatacccaatttatcggcgatagcatgaactcttttctcaatatcagtagggttctgtttgtt

SEQ ID NO: 33676 - DNA, 260 bp, Unknown
  Description of Unknown: RightRegion for integrase B7677 sequence
gtttcaaaaatcataataaacgggccggacaaatctataacaccctgcttttattattgatcgccgtcttgatgttgttcattccagttgtgccagacgttctggacgtcgtcgttatcctcgagcatttccagcagcttctccattttcgccacctggtcgggatcgtcgatcgcagtataaacatccggcacctgctcgatttccgccgaaacgaacgaatagcccttggcctccagatcatcgcgcacgccggaaaa

SEQ ID NO: 33677 - DNA, 260 bp, Unknown
  Description of Unknown: RightRegion for integrase B7678 sequence
gtcattaaagaaattagaattgataatgaccagaatatcacgggtgttgtttttgggtagtgttgtactaacgtgacactacccgtgggctgtgttaagttagtacaaaataaagaaccccagcaaggctgctgcctgccggggttcttcttttctaaaactcttcttcgtagccagttgttttccactgtaaaacttcgccgtcgtcgtccacttcgtctggctcctgcactggtctgtatgttctttcttttccctct

SEQ ID NO: 33678 - DNA, 88 bp, Unknown
  Description of Unknown: RightRegion for integrase B7679 sequence
gtcattaaagaaataagaattgacaatgaccagaatatcacgggtgttgtttttgggtagtgttgtactaatttaacactacccgtcg

SEQ ID NO: 33679 - DNA, 260 bp, Unknown
  Description of Unknown: RightRegion for integrase B7680 sequence
gtcattaaagaaattagaattgataatgaccagaatatcacgggtgttgtttttgggtagtgttgtactaatgtgacactacccgtcggctcatctgcaaatacaatacttggattcagcacgagagctctcgccatacccacacgctgctgctgcccaccggacatctgatttggcttatgtaagcggtatttcttcagaccaaccagatcgatcatcttctgtgcccgcttcatacggacatttttggagatgccccg

SEQ ID NO: 33680 - DNA, 110 bp, Unknown
  Description of Unknown: RightRegion for integrase B7681 sequence
acaatacaggagatttacctaaatgatgacaatacgattaaagctgtagattttttataatctgttttgtactaagtgtttagccccatttggagccgacaaaacgatga

SEQ ID NO: 33681 - DNA, 145 bp, Unknown
  Description of Unknown: RightRegion for integrase B7682 sequence
gtcattaaagaaattagaattgataatgaccagaatatcacgggtgttgtttttgggtagtgttgtactaatgtgacactacccgtaggctcatctgccaggatcagggacggatccccggccagcgctcttgcaatagatacac

SEQ ID NO: 33682 - DNA, 260 bp, Unknown
  Description of Unknown: RightRegion for integrase B7683 sequence
gtcattaaagaaattagaattgataataaccagaatatcacgggtgttgtttttgggtagtgttgtactaacgtgacactacccgtgggttcatccgccataataatctccggattctttaccaacgctctcgcaatcgcaacacgctgtttctgtccgccggataattcattcggctttctgctgccataaccctctaaatctacttccctcaatatctcgttgatttcttcgtctgtcgcttttttcccctgaagctc

SEQ ID NO: 33683 - DNA, 109 bp, Unknown
  Description of Unknown: RightRegion for integrase B7684 sequence
ttgctgatcagtgagatcgaagttgctaacgattctatcaagattcactggcgtttttaaataattttagaaactttgatttcaactaacgtaaaagcggatttatttt

SEQ ID NO: 33684 - DNA, 260 bp, Unknown
  Description of Unknown: RightRegion for integrase B7685 sequence
gtcattaaagaaataagaattgacaatgaccagaatatcacgggtgttgtttttgggtagtgttgtactaattgaacactacccgtcggttcgtcagccaagatgatagccggttttgtaatcaaagctctggcaattgcaaccctctgttgttgcccacctgatagatttccaggaagattctccaattttttatcaatgcccaaaattgttacaattttgttcaaaaaatctttatctatatcatttccgtctaattc

SEQ ID NO: 33685 - DNA, 260 bp, Unknown
  Description of Unknown: RightRegion for integrase B7686 sequence
tcaatcgaagttacatggacaacggaaattaagagaattgacaaggttaattttttttagccttgttatactactaacataatatatccattcggtgacagttagttaatagtataacatcaataataattaaggcttgtaaaaaattagattataggatataatgtgattgatgtttataatagaacatcaattactgtccttgtaagtgtcacctttgggtggcacttattttttttgaaaaagtttaaaaaaaggac

SEQ ID NO: 33686 - DNA, 85 bp, Unknown
  Description of Unknown: RightRegion for integrase B7687 sequence
ttactgatcagtgagattgaagttgctaacgattccatcaagatccactggcgtttttaaataattttagaaactttcatctcaa

SEQ ID NO: 33687 - DNA, 260 bp, Unknown
  Description of Unknown: RightRegion for integrase B7688 sequence
gccattaaagaaattagaattgataatgaccagaatatcacgggtgttgtttttgggtagtgttgtactaatgtgacactacccgtcggttcatcagcaagtattatctgcggattagttataagtgcccttgctactgctgctctttgcttctgtccaccagatacctcatatggatatttatccagaagctgttctataccaagtcttttagaaagcggctttaccctttcttccatctcgttatatttttttcctga

SEQ ID NO: 33688 - DNA, 260 bp, Unknown
  Description of Unknown: RightRegion for integrase B7689 sequence
ataataaaacagatacaccttaatgatgattgcacaataaaagaggtagattttttgtaaattattttgtactaattatattgccccatttggcgccgataaaacaatgaccgccgttctctccggtgaggcagatatcggctttatgggatcagaagcttccatctacacttacaacgaaggggcaaatgattatgtcgtcaactttgcacagctgacacagcgcgcaggcaacttccttgtcgcacgggaagaaatgc

SEQ ID NO: 33689 - DNA, 260 bp, Unknown
  Description of Unknown: RightRegion for integrase B7690 sequence
gtcattaaagaaattagaattgataatgaccagaatatcacgggtgttgtttttgggtagtgttgtactaattgaacactacccgtcggctcatcagcgaatataactgacggatgtgtaatcagtgcccttgcgattgcaactctctgctgttcaccacctgacatctgtgcaggaaatttatccttacagtaatctatgccaagtgattccattaattcagtgactttctcctcatcagcttgctcactgtcaagaat

SEQ ID NO: 33690 - DNA, 260 bp, Unknown
  Description of Unknown: RightRegion for integrase B7691 sequence
gtcattaaagaaattagaattgataatgaccagaatatcacgggtgttgtttttgggtagtgttgtactaatgtgacactacccgtaggttcatctgctaataagagtttaggatgattgattaatgctctgccaatggctattttttgctgttgaccaccagaaagctgacccggataaaaatttgccttgttttccatccccaaaatcgtcagtattttcttaacttctctttgatctacgcttttaccatccatcag

SEQ ID NO: 33691 - DNA, 260 bp, Unknown
  Description of Unknown: RightRegion for integrase B7692 sequence
gtcattaaagaaattagaattgataatgaccagaatatcacgggtgttgtttttgggtagtgttgtactaattgaacactacccgtcggctcgtcggcaaggatgattgccggtttgctggctaaagctcttgcaatggcgacgcgctgctgctggccgccggaaagagtgttgggcatattgtagagtttcttttccagccccagcaaagccacgatctctttgataaatttctgatccggctttttcccgtcaagctg

SEQ ID NO: 33692 - DNA, 85 bp, Unknown
  Description of Unknown: RightRegion for integrase B7693 sequence
gtcattaaagaaataaggattgacaatgaccagaatatcacgggtgttgtttttgggtagtgttgtactaattgaacactacccg

SEQ ID NO: 33693 - DNA, 131 bp, Unknown
  Description of Unknown: RightRegion for integrase B7694 sequence
gtcattaaagaaattagaattgataatgaccagaatatcacgggtgttgtttttgggtagtgttgtactaatgtgacactacccgtcggttcatcggcaaatatcaccttgggcctcgtcacaaacgccct

SEQ ID NO: 33694 - DNA, 260 bp, Unknown
  Description of Unknown: RightRegion for integrase B7695 sequence
gtcattaaagaaattagaattgataatgaccagaatatcacgggtgttgtttttgggtagtgttgtactaatgtgacactacccgtcggctcatcagccaatatgatagaaggttttgctgccagcgctctggctatcgcaaccctctgctgctggcctcctgacagctggttaggcatggaaaatttcttttccgataagccgagcacatccataattttatctacatacacagtgtctatcttcgttccatccagctc

SEQ ID NO: 33695 - DNA, 139 bp, Unknown
  Description of Unknown: RightRegion for integrase B7696 sequence
gtcattaaagaaattagaattgataatgaccagaatatcacgggtgttgtttttgggtagtgttgtactaattgaacactacccgtaggttcatctgccaaaacaacagaacattttttcatcataagacgagctaaag

SEQ ID NO: 33696 - DNA, 260 bp, Unknown
  Description of Unknown: RightRegion for integrase B7697 sequence
gccattaaagaaattagaattgataatgaccagaatatcacgggtgttgtttttgggtagtgttgtactaatgtgacactacccgtaggctcatctgccagtaccagctccggcttgattatcaaggctcttgctaccgccgcacgctgtttctgtccgccagatacttcataaggatattttccaagaatatcaagaattccaagctgcgccgcaatcggtgttatgcgccgctccatctctttataatccacaccgga

SEQ ID NO: 33697 - DNA, 260 bp, Unknown
  Description of Unknown: RightRegion for integrase B7698 sequence
gtcattaaagaaattagaattgataatgaccagaatatcacgggtgttgtttttgggtagtgttgtactaatgtgacactacccgtaggttcatccgccaaaatcagtttgggctttgcgattaacgcccgtccaatggcgacacgctgctgctgtccgccggatagttgattcggcaggtggtaccgacgttcggtaaggcccaagagatccaagatttcttctaccgctgccggatctggcttgcgatagtccaagag

SEQ ID NO: 33698 - DNA, 260 bp, Unknown
  Description of Unknown: RightRegion for integrase B7699 sequence
gtcattaaagaaattagaattgataatgaccagaatatcacgggtgttgtttttgggtagtgttgtactaatgtgacactacccgtcggttcatcagcaagtattatctgcggattagttataagtgcccttgctactgctgctctttgcttctgtccaccagatacctcatagggatatttatccagaagttgttctataccaagtcttttagaaagcggctttaccctttcttccatctcgttatattttttccctga

SEQ ID NO: 33699 - DNA, 260 bp, Unknown
  Description of Unknown: RightRegion for integrase B7700 sequence
gtcattaaagaaattagaattgataatgaccggaatatcacgggtgttgtttttgggtagtgttgtactaattgaacactacctgtaggctcatccgcaagcacaatggcgggcttggtaatcagcgccctggctattgccacccgctgctgctgtccgcctgacagctgattgggcatgctgtccagcttttccttcaaagacaggatatccacgatccggtcaaacagcgccaaatccactgcttccccgtccagctc

SEQ ID NO: 33700 - DNA, 260 bp, Unknown
  Description of Unknown: RightRegion for integrase B7701 sequence
ataataaaacagatacaccttaatgatgattgcacaataaaagaggtagattttttgtaaattattttgtactaattatattgccccatttggtgccgataagacaatgaccgccgttctctccggcgaggcagatatcggctttatgggatcagaagcttccatctacacttacaacgaaggggctaatgattatgtcgtcaactttgcacagctgacacagcgcgcaggcaacttccttgtcgcccgggaagaaatgc

SEQ ID NO: 33701 - DNA, 260 bp, Unknown
  Description of Unknown: RightRegion for integrase B7702 sequence
gtcattaaagaaattagaattgataatgaccagaatatcgcgggtgttgtttttgggtagtgttgtactaatgtgacactacccgtcggttcatcagctaaaatcagtttcggttcattgattaaggctctagcacaagcacaacgctgtttttgtccgccagaaacttcataaggaaatttcgataaaatatcacgaatacccaatttatcggcgatagcatgaactcttttctcaatatcagtagggttctgtttgtt

SEQ ID NO: 33702 - DNA, 260 bp, Unknown
  Description of Unknown: RightRegion for integrase B7703 sequence
gtcattaaagaaataagaattgacaatgaccagaatatcacgggtgttgtttttgggtagtgttgtactaactgaacactacccgtgggctcatcagcaagaataagctttgggttcgtaataatggctcttgcacttgctaccctctgcttctgtccgcctgacatctgataaggatatttgtttaatacatcttcaataccaagctctcttgcagtctgtcttactcttaattcaatctcccttgccggaacattctg

SEQ ID NO: 33703 - DNA, 260 bp, Unknown
  Description of Unknown: RightRegion for integrase B7704 sequence
gtcattaaagaaattagaattgataatgaccagaatatcacgggtgttgtttttgggtagtgttgtactaacttaacactaccagttggctcatctgccaataagagtttcggattgttgataattgctcttgcacaggcacaacgctgtttttgaccgcccgatacctgataaggatatttgtttagcatatcgctgatattcagctttccggctatatccaaaatgctgggttctacactcccggcagggactttatt

SEQ ID NO: 33704 - DNA, 138 bp, Unknown
  Description of Unknown: RightRegion for integrase B7705 sequence
gtcattaaagaaattagaattgataatgaccagaatatcacgggtgttgtttttgggtagtgttgtactaatgtgacactacccgtcggttcatctgcaagcaggatatccggatcattcactaatgcccgggcaatc

SEQ ID NO: 33705 - DNA, 260 bp, Unknown; identical to SEQ ID NO: 33700
  Description of Unknown: RightRegion for integrase B7706 sequence

SEQ ID NO: 33706 - DNA, 260 bp, Unknown
  Description of Unknown: RightRegion for integrase B7707 sequence
acacacgtagatacgtgtgccccaataaatttatttatctttctattttccattaaataattctccttaatttctcttcttagtatcttatactaattatatcataaattaataaataaataaattagaattattctttaaaatatttttaaataatttatagaatagtggaagaaggaaaggttaaagtttaaatatgagtagccaaataaaaaaaagaaagaaaatatattaaaatttactttttttatattttaaat

SEQ ID NO: 33707 - DNA, 260 bp, Unknown
  Description of Unknown: RightRegion for integrase B7708 sequence
gtcattaaagaaattagaattgataatgaccagaatatcacgggtgttgtttttgggtagtgttgtactaacgtgacactacccgtaggctcatcacataaaatagcttccggagatactgcaagcgcccttgcgattgcaactctttgttgttcaccgccggacaaattgattgggtaatcattttccttgctttctaagccgacactttttagcaagcctgtaattatctcgtgacgctgtttggcggtaaacgactt

SEQ ID NO: 33708 - DNA, 86 bp, Unknown
  Description of Unknown: RightRegion for integrase B7709 sequence
gtcattaaagaaattagaattgataatgaccagaatatcacgggtgttgtttttgggtagtgttgtactaatgtgacactacccgt

SEQ ID NO: 33709 - DNA, 260 bp, Unknown; identical to SEQ ID NO: 33700
  Description of Unknown: RightRegion for integrase B7710 sequence

SEQ ID NO: 33710 - DNA, 260 bp, Unknown
  Description of Unknown: RightRegion for integrase B7711 sequence
tctctccgtaaagaaaaagaaaagcaggaacgtgccttgcaacgtttgcaagatttatagctgtattcagacaaatcaatgtctgaaaaagactttattcttcgaaaaagtgaaatatcggatcacctaaaaagcatcaatgcccaacttggtctcattacccagaatacagactcttttctgtctgacgaagaatttataaagcaagccagtcatcttctcatacagaaggaattaaaaaaccggaaatatatctacta

SEQ ID NO: 33711 - DNA, 260 bp, Unknown
  Description of Unknown: RightRegion for integrase B7712 sequence
gtcattaaagaaattagaattgataatgaccagaatatcacgggtgttgtttttgggtagtgttgtactaatgtgacactacccgtcggttcatctgccagcaaaatagcaggttttgccgctaaagcccttgcaattgccactctctgctgctgtcccccggataaagcacttggcagattttccaattttgtccgaataccaagtgtatcaatgatttcatctacatatttcttttcaatctttttgccatccagttt

SEQ ID NO: 33712 - DNA, 260 bp, Unknown
  Description of Unknown: RightRegion for integrase B7713 sequence
ataataaaaaaaatagaaatagatgacaataaagaagtctttattcatcttaatttttaaaaagaccaattagcaataagccgattggtcttttcttctataaataaattaaagttcacttactggtttcttccaagttcctaatataaaggctgttacaagtgaaccgataactactgatacaagatacattactgggtttgtaactactgggaaaacgaatattccaccatgtggtgctggtaacaatactccaaaga

SEQ ID NO: 33713 - DNA, 260 bp, Unknown
  Description of Unknown: RightRegion for integrase B7714 sequence
ataataaaacagatacaccttaatgatgattgcacaataaaagaggtagattttttgtaaattattttgtactaattatattgccccatttggcgccgataagacaatgaccgccgttctctccggcgaggcagatatcggctttatgggatcagaagcttccatctacacttacaacgaaggggcaaaggattatgtcgtcaactttgcacagctgacacagcgcgcaggcaacttccttgtcgcccgggaagaaatgc

SEQ ID NO: 33714 - DNA, 260 bp, Unknown
  Description of Unknown: RightRegion for integrase B7715 sequence
gtcattaaagaaattagaattgataatgaccagaatatcacgggtgttgtttttgggtagtgttgtactaatgtgacactacccgtcggttcatcggcaaggatcatttggggatgtaagatcagagcccttgctgccgcaacacgctgacgctggccgccggacatcttggacggaaacttatccagaacatcagtgatttccagatagtcagccaactgcttcagccgctggctgctttctgcttcggataccccatg

SEQ ID NO: 33715 - DNA, 260 bp, Unknown
  Description of Unknown: RightRegion for integrase B7716 sequence
acaatacaggagatttacctaaatgatgacaatacgattaaagctgtagattttttataatctgttttgtactaagtgtttagccccatttggagccgacaaaacgatgactgctgtactttctggtgaagcagatatcggatttatggggtcggaagcttccatttacacgtataacgaaggcgcttctgactttgttgtaaactttgcccagctcacccagcgcgcaggcaattttcttgttgccagagaagagaggc

SEQ ID NO: 33716 - DNA, 260 bp, Unknown
  Description of Unknown: RightRegion for integrase B7717 sequence
ataataaaacagatacaccttaatgatgattgcacaataaaagaggtagattttttgtaaattattttgtactaattatattgccccatttggggttacatacttagtacaaaataaatttaaactaagatgatacaatatattctttttcatcctcccctcattgcgaagggaggatatttttataccaatctaagctcaatcgcttcgatcttcttgttcatgccgaccgttccgatcatgccggacgtccaacgagt

SEQ ID NO: 33717 - DNA, 162 bp, Unknown
  Description of Unknown: RightRegion for integrase B7718 sequence
ataataaaaaaaatagaaatagatgagaataaagaagtttttattcatcttaatttttaaaaaaagaccaattagcaataagccgattggtctttcttctataataaattaaagttcattcactggttttttccaagctcctaatataaaggctgtaaccag

SEQ ID NO: 33718 - DNA, 260 bp, Unknown
  Description of Unknown: RightRegion for integrase B7719 sequence
gtcattaaagaaattagaattgataatgaccagaatatcacgggtgttgtttttgggtagtgttgtactaatgtgacactacccgtcggttcatctgctaatatcaatttgggattgtttacaaaagcccttgcacaagcacacctttgtttttgccctcccgacacatgggcgggtaatttaccagctatatcactaatgttcagccgttgcataagtcgtttgacaattttttctatttctttccccggaatcccctt

SEQ ID NO: 33719 - DNA, 109 bp, Unknown
  Description of Unknown: RightRegion for integrase B7720 sequence
ataataaaaaaaatagaaatagatgataataaagaagttttcattcatcttaatttttaaaaaaagaccaattagcaataagccgattggtctttctctttatataatc

SEQ ID NO: 33720 - DNA, 260 bp, Unknown; identical to SEQ ID NO: 33700
  Description of Unknown: RightRegion for integrase B7721 sequence

SEQ ID NO: 33721 - DNA, 260 bp, Unknown
  Description of Unknown: RightRegion for integrase B7722 sequence
gtcattaaagaaattagaattgataatgaccagaatatcacgggtgttgtttttgggtagtgttgtactaatgtgacactacccgttggctcatctgccaataagagtttcggattgttgataattgctcttgcacaggcacaacgctgtttttgaccgcccgatacctgataaggatatttgtttagcatatcgctgatattcagctttccggctatatccaaaatgctgggttctacactcccggcagggactttatt

SEQ ID NO: 33722 - DNA, 260 bp, Unknown
  Description of Unknown: RightRegion for integrase B7723 sequence
ttgctgatcagcgagattgaagttgccaacgattccatcaagattcactggcgtttttaaataattttagaaactttcatttcaatcaacgtaaacgcagatttatttttgctctgactttttttaatcattgatacatcccccctaaactggaatacaacggcaaaagcatcgacaaataacatccaataataatgagcgcgatcacaagaaataaaaccggctgaacaagcgatatcagaccatcaatctggcgaacc

SEQ ID NO: 33723 - DNA, 260 bp, Unknown
  Description of Unknown: RightRegion for integrase B7724 sequence
gccattaaagaaattagaattgataatgaccagaatatcacgggtgttgtttttgggtagtgttgtactaatgtgacactacccgtgggctcatccgccaggattaaggacggatctcctgcgagagcccgcgcgatggagactcgctgctgctggccgccggagagctggttcggaagattcttccatttttcgtcgagaccgaccttttttaaggaattcatggcccgctcccgccgttctttcttgtcgtaaccggc

SEQ ID NO: 33724 - DNA, 260 bp, Unknown
  Description of Unknown: RightRegion for integrase B7725 sequence
gtcattaaagaaattagaattgataatgaccagaatatcacgggtgttgtttttgggtagtgttgtactaatgtgacactacccgttggctcatcagccaaaattaattcgggatttgttattatcgcacgtgccactgctgccctttgcttctgtcctcctgacacctcgtatggatatttattaagcagcttttcaattccaagcagtgaagctataggtgcaagccttttttccatatccctatagtccacacctga

SEQ ID NO: 33725 - DNA, 260 bp, Unknown
  Description of Unknown: RightRegion for integrase B7726 sequence
gtcattaaagaaattagaattgataatgaccagaatatcacgggtgttgtttttgggtagtgttgtactaatgtgacactacccgtcggttcatctgccagaatcagctgcggacgggtgatcagtgcgcgggcaaccgccgccctctgcttctgtccgccggaaacctcataaggatatttctcaagcagcacatcgatcccaagcttttcggcaatcggccaaagccgctcctccatctcctgcaccggtgcatctgc

SEQ ID NO: 33726 - DNA, 260 bp, Unknown
  Description of Unknown: RightRegion for integrase B7727 sequence
gtcattaaagaaattagaattgataatgaccagaatatcacgggtgttgtttttgggtagtgttgtactaatgtgacactacccgtgggctcatcacacaacaggatatctggatttttaataagtgctcttcctattgaagttctctgctgctgtccgcccgataactgattaggcttcttatcagcatggtctgaaagtcctaatgtattaagaatctcatctgtatcaagtgccttatcacttaggtaagcaccaac

SEQ ID NO: 33727 - DNA, 150 bp, Unknown
  Description of Unknown: RightRegion for integrase B7728 sequence
gtcattaaagaaataagaattgataatgaccagaatatcacgggtgttgtttttgggtagtgttgtactaattgaacactacccgtcggctcatctgcaaatataatttccggacgattcaccagtgctcttgcaattgctactctctgc

SEQ ID NO: 33728 - DNA, 260 bp, Unknown
  Description of Unknown: RightRegion for integrase B7729 sequence
gtcattaaagaaattagaattgataatgaccagaatatcacgggtgttgtttttgggtagtgttatactaatgtgacactacccgtaggctcatcacataaaatggcttccggagatactgcaagcgcccttgcgattgcaactctttgttgttcaccgccggacaaattgattgggtaatcattttccttgctttctaagccgacactttttagcaagcctgtaattatctcgtgacgctgtttggcggtaaacgactt

SEQ ID NO: 33729 - DNA, 260 bp, Unknown
  Description of Unknown: RightRegion for integrase B7730 sequence
gtcattaaagaaattagaattgataatgaccagaatatcacgggtgttgtttttgggtagtgttgtactaatgtgacactacccgtaggttcatccgccaaaatcagtttgggctttgtgattaacgcccgtccaatggcgacacgctgctgctgtccgccggatagttgattcggcaggtggtgccgacgttcggtaaggcccaagagatccaagatttcttctacctctgccggatctggcttgcgatagtccaagag

SEQ ID NO: 33730 - DNA, 260 bp, Unknown
  Description of Unknown: RightRegion for integrase B7731 sequence
tccttcgtgcagtcaatcactgttcacgaggacggagaaatggatattgtttttttatgatcttgtttctactaactacgcatcgcccgtcggctcatctgcaaggatcagcttgggctgcgtgatcagcgctcttgccactgccgccctttgtttctgaccgccggatacttcatatggaaacttcttcaaaagttgagtgattccaagctgctgtgcaattggtttgagtttctgactcatctccggatactttttgc

SEQ ID NO: 33731 - DNA, 260 bp, Unknown
  Description of Unknown: RightRegion for integrase B7732 sequence
acaatcaagcagattcacctaaatgaagactctacgatcaagtttgttgattttttgtagtgcgtctctgtctgggaggcgcgctccaaaaccggtaactagcgtcagctcaatgccttcatcctcaaaatatccttcttcaatcgccacatacatcggagcataaaagatagaatgtgccacctcattcaacgttacagacactaatttcttctcttctgtttcttttgtatcttttactgtctgactaagctccgaag

SEQ ID NO: 33732 - DNA, 260 bp, Unknown
  Description of Unknown: RightRegion for integrase B7733 sequence
tctttcattaaatctattgtcgtttacgaagatggcagtatggacattaattttttataattttttatttatactaactgtacttaaccattaggttatcaatagttagtataaatgttgttttgtgcattttgcctttttctttgctgtgatctgtgtctgatcgtagccgtctcgttgtcaatttgcacagaaggcaacgactttcccggtcgctgccttcttttaaattattccatttcttttatgattgttttttc

SEQ ID NO: 33733 - DNA, 130 bp, Unknown
  Description of Unknown: RightRegion for integrase B7734 sequence
ataaaaaaaatagatttaatttcaagcaagccgccagaatttaaaatctatttaaaataaaaaggtatactaattatggtgcgaagagagagacttgaactctcacgtctgggacactagatcctaagtc

SEQ ID NO: 33734 - DNA, 260 bp, Unknown
  Description of Unknown: RightRegion for integrase B7735 sequence
gagtttgttgaacgtatagaactatttgatgatgaggtaattattaaatataaattttaggtacatagtgttatttacactaataaacaaaaccatatacctaaattattacatttatacaaaccgatagacaacacgaacatatattcggtataattatattgctaggaggccgatattatgaaaactaattatgtaggagtagttgaaaagattagaatgttaagtatgtacccaaaaatgctagttcgattctcatt

SEQ ID NO: 33735 - DNA, 260 bp, Unknown
  Description of Unknown: RightRegion for integrase B7736 sequence
acgatcaagcagatccacctgaatgaagactctacgatcaagtttgttgattttttgtagtgcgtctctgtctgggaggcgcgctccaaacggggttagctagttaggcagggattactatattataatggctgtttttccctctttttgaagtttcttttgaagtgcttcggcattcgcttttgacttaaacgcacccttctgttcatacacccggtagatcctacctgcagtccccgtcttggtaggcgtagacgtac

SEQ ID NO: 33736 - DNA, 260 bp, Unknown
  Description of Unknown: RightRegion for integrase B7737 sequence
tccttcgtgcagtcaatcactgttcacgaggacggagaaatggatattgtttttttatgatcttgtttctactaactacgcaccgcctgtcggtactgcgtagttagtaaaaacgattcttttgtgcagttttgcttttctctggctccgatcgtggcgcgatctggactttgcaaaaggcaaattgcacaaaaaaagagggccgaacagggaactgctccctgctcggtcctcttttactttctcatcttatttcttca

SEQ ID NO: 33737 - DNA, 260 bp, Unknown
  Description of Unknown: RightRegion for integrase B7738 sequence
tccttcgtgcagtcaatcactgttcacgaggacggagaaatgaatattgtttttttatgatcttgtttctactaactacgcaccgcccgtcggctcgtctgccagaatcagagaaggacgggtaatcaatgcgcggccaatcgccactctctgctgctgaccgccggataactggctcggcaaatggttacggcgttctttcagattaagaacagtaagcagttcttccagatattttttgtccggcttctgatagtcaa

SEQ ID NO: 33738 - DNA, 260 bp, Unknown
  Description of Unknown: RightRegion for integrase B7739 sequence
ataataaagaaaatagaagtaaatgaggagagagaagtttttattcatcttaacttttaaaaaagacagaccaataaattagtctgtctttttcttacattaatataatattattcttgaacaggttttttaataaatcctaagattaaagctgtaactacagaacctactattatagcaactagatacataatagggtttgtcataactggtaatacaaataatccaccatgtggagctggtaattgtaccttaaagaa

SEQ ID NO: 33739 - DNA, 260 bp, Unknown
  Description of Unknown: RightRegion for integrase B7740 sequence
acgatcaagcagattcacctaaatgaagactctacgatcaagtttgttgattttttgtagtgcgtctctgtctgggaggcgcgctccaaacggggttaaccagttaggcagagattactatattataatggctgccatttcctcttttttacgacctatgctttctttttaataagcacagcactatccaggatctccaacgtgacagctctgtcttctggtgttactcctaatgctttaatagcatctgccggaaggga

SEQ ID NO: 33740 - DNA, 109 bp, Unknown
  Description of Unknown: RightRegion for integrase B7741 sequence
acgatcaagcagatccacctgaatgaagactctacgatcaagtttgttgattttttgtagcgcgtttctgcctgaggggcgcgctccaaaaccggtaactagcgtcagc

SEQ ID NO: 33741 - DNA, 260 bp, Unknown
  Description of Unknown: RightRegion for integrase B7742 sequence
tccttcgtgcagtcaatcactgttcacgaggacggagaaatggatattgtttttttatgatcttgtttctactaactatgcaccgcctgtcggttcgtccgcaaggatcagcttcggatctgtgatcagtgcccttgcaactgctgctctctgcttctgtccgccggaaacctcgtaggggaatttttccagaagctggttgatgtgaagggcttttgcaatgggacggatcttctgctccatctcctgataatcttccc

SEQ ID NO: 33742 - DNA, 260 bp, Unknown
  Description of Unknown: RightRegion for integrase B7743 sequence
tccttcgtgcagtcaatcactgttcacgaggacggagaaatggatattgtttttttatgatcttgtttctactaactacgcaccgcccgtcggtactgcgtagttagtaaaaacgattcttttttgcagttttgcttttctctggctctgatcggggcgcgatctggactttgcaaaaggcaaattgcacaaaaaaagagggccgaacagggaactgctccctgcccggtcctcttttactttctcatcttatttcttca

SEQ ID NO: 33743 - DNA, 133 bp, Unknown
  Description of Unknown: RightRegion for integrase B7744 sequence
gagtttgttgaacgtatagaactatttgatgatgaggtaattattaaatataaattttaggtacatagtgttatttacactaataaacaaaaccatatacctaaaatattacatttatacaaatcgatagaca

SEQ ID NO: 33744 - DNA, 109 bp, Unknown
  Description of Unknown: RightRegion for integrase B7745 sequence
acgatcaagcagatccacctgaatgaagactctacgatcaagtttgttgattttttgtagcgcgtttctgcctgaggggcgcgctccaaagccagtaaccagcgtcagg

SEQ ID NO: 33745 - DNA, 260 bp, Unknown
  Description of Unknown: RightRegion for integrase B7746 sequence
tccttcgtgcagtcaatcactgttcacgaggacggagaaatggatattgtttttttatgatcttgtttctactaactacgcaccgcctgttggttcatctgctaaaataagtttcggttttgtaatcaaggctctgccgattgctacacgttgctgttgtcctcccgataactggctcggtaagtgataacggcgctcggttaatccaagaagatttaggatttcttctacttctttcgggtcgggtttacgatagtcca

SEQ ID NO: 33746 - DNA, 260 bp, Unknown
  Description of Unknown: RightRegion for integrase B7747 sequence
acgatacaggagatttacctaaatgatgacaatacgattaaagctgtagattttttataatctgttttgtactaagtgtttagccccatttggggcagtataattagtacaaaataaatgatacaatattcaggacggcagatccatccgtccaacactcatatatgccgcccgtaaaaaggtgtgcatcatttcggttgtcaggatcatcccttctggcagccggaatttaaaagtatttccgggtatctctataaact

SEQ ID NO: 33747 - DNA, 260 bp, Unknown
  Description of Unknown: RightRegion for integrase B7748 sequence
tccttcgtgcagtcaatcactgttcacgaggacggagaaatggatattgtttttttatgatcttgtttctactaactacgcaccgcctgtcggtactgcgtagttagtagaaacgattcttttgtgcagttttgcttttctctggctccgatcggggcgcgatctggactttgcaaaaggcaaattgcacaaaaaagagggccgaacagggaactactccctgcccggtcctcttttgctttctcatcttatttcttcag

SEQ ID NO: 33748 - DNA, 260 bp, Unknown
  Description of Unknown: RightRegion for integrase B7749 sequence
tccttcgtgcagtcaatcactgttcacgaggacggagaaatggatattgtttttttatgatcttgtttctactaactacgcaccgcccgttggctcatcagccaaaattaattcgggatttgttattatcgcacgtgccactgctgccctttgcttctgtcctcctgacacctcgtatggatatttattaagcagcttttcaattccaagcagtgaagctataggtgcaagccttttttccatatccctatagtccacac

SEQ ID NO: 33749 - DNA, 260 bp, Unknown
  Description of Unknown: RightRegion for integrase B7750 sequence
tccattgtcaaggaaatccgtgttgaccatgacaaaaacattcatattatttttttatgattgttgtactactaacttaccccctccggtcggtaggttcaacttagtagtatgaaaaattctttatattttttacgtgttttacgtgtttttctattgactttacgtgttttacgtgttattataatcatgtaaggaggaaacaatacaaatgagatttcgagaacttgaaagattagtcctcgatgacggatgggttc

SEQ ID NO: 33750 - DNA, 260 bp, Unknown
  Description of Unknown: RightRegion for integrase B7751 sequence
tccttcgtgcagtcaatcactgttcacgaggacggagaaatggatattgtttttttatgatcttgtttctactaactacgcacctcctgtcggtactgcgtagttagtaaaaacgattcttttgtgcagttttgcttttctctggctccgatcggggcgcgatctggactttgcaaaaggcaaattgcacaaaaaagagggccgaacagggaactgctccctgcccggtcctcttttactttctcatcttatttcttcag

SEQ ID NO: 33751 - DNA, 260 bp, Unknown; identical to SEQ ID NO: 24868
  Description of Unknown: RightRegion for integrase B7752 sequence

SEQ ID NO: 33752 - DNA, 260 bp, Unknown
  Description of Unknown: RightRegion for integrase B7753 sequence
acaatacaggaaatttatctaaacgaagacaatacgattaaaggtgttgattttatttagtgcgtcttgtactaaacatctagccccatttggagccgacaaaacgatgactgctgtactttctggtgaagcagatatcggatttatggggtcggaagcttccatttacacgtataacgaaggcgcttctgactttgttgtaaactttgcccagctcacccagcgcgcaggcaattttcttgttgccagagaagagaggc

SEQ ID NO: 33753 - DNA, 260 bp, Unknown
  Description of Unknown: RightRegion for integrase B7754 sequence
tccttcgtgcagtcaatcactgttcacgaggacggagaaatggatattgtttttttatgatcttgtttctactaactacgcaccgcctgtcggttcatctgctaaaatcaggttagcatccatcataagtcctctggcaattgcaactctttgtttttgccctccacttaatgtctgtactttccgattcgttaactctgcaatatgcaaatattccaaaatttcctgcgcgcgtatatttgcactttttatgcttcttt

SEQ ID NO: 33754 - DNA, 260 bp, Unknown
  Description of Unknown: RightRegion for integrase B7755 sequence
tccttcgtgcagtcaatcactgttcacgaggacggagaaatggatattgtttttttatgatcttgtttctactaactacgcaccgcccgtcggttcatcagcaaggataatcgcaggcttcgtaattaaagctcgtgcaatcgctacacgttgctgttgaccgcctgaaagattgttcggcatattttccagtttatcttctaaagccaacatatacacaacttcgtccataaatttctggtctactgtatcgccatcca

SEQ ID NO: 33755 - DNA, 260 bp, Unknown
  Description of Unknown: RightRegion for integrase B7756 sequence
attataaaagaaatacatatcaatacgagccatgaggtcaccggcatcgatttctattaaccaataaaagtgtcttgtactaactataccgccccatttggcgcagataaagtcatgaccgccgtcctctccggcgaagccgacatcggattcatgggttccgagtcttcaatctatacctataatgagggggcaaccgattatgttgtaaactttgcccaattgacacagcgtgcaggaaacttccttgtctcccggga

SEQ ID NO: 33756 - DNA, 109 bp, Unknown
  Description of Unknown: RightRegion for integrase B7757 sequence
acaatacgggaaatttatctaaacgaagacaatacgattaaatgcgttgattttatttagtccgtcttgtactaaacatctaactccatttggagccgataaaacaatg

SEQ ID NO: 33757 - DNA, 260 bp, Unknown
  Description of Unknown: RightRegion for integrase B7758 sequence
acgatccgacagattcacctgactcctgaatacaccgttgattttgttgactttatttaagctgtctgcgcctaaattgcgaactccgtttggagccgacaagacaatgactgctgtcatctccggtgaagctgatattggattcatgggatcagaagcatccatctacacatataacgaaggtgctaacgattctgtcgtcaactttgcccaactgactcagcgcgccggtaattttcttgttgccagagaagagatga

SEQ ID NO: 33758 - DNA, 260 bp, Unknown
  Description of Unknown: RightRegion for integrase B7759 sequence
tccttcgtgcagtcaatcactgttcacgaggacggagaaatggatattgtttttttatgatcttgtttctactaactacgcaccgcccgtcggttcatctgccagcaaaatagcaggttttgcagctaaagcccttgcaattgccactctctgctgctgtccaccggatagagcacttggcagattttccaattttgtccgaataccaagtgtatcaatgatttcgtctacatatttcttttcaatcttttttccatcca

SEQ ID NO: 33759 - DNA, 260 bp, Unknown
  Description of Unknown: RightRegion for integrase B7760 sequence
tccttcgtgcagtcaatcactgttcacgaggacggagaaatggatattgtttttttatgatcttgtttctactaactacgcacctcctgtaggttcatcacataaaatggcttccggcgatactgcaagtgcgcgggcaatcgccactctttgttgttcgcctcctgataaattagatggataatcattttcttttccttctaatccaacactttgcaaaagatttcgtattgcttctttccgctgtcttgtattcattt

SEQ ID NO: 33760 - DNA, 260 bp, Unknown
  Description of Unknown: RightRegion for integrase B7761 sequence
accataacttttgatgaattaaataattgttcggatttacccgactcacctcgaccataaaaaagagataccagatgaaaggtatcttttttttatttattagtatgtacaagacttgaacttgcggcaggcttctccgaattcgacgagcaaaagcgaagtgcgaatttgggagaaacagtccggtggactgtttcgtagaaggctagttcagttctgtgtcacctcgaccataaaaaagagataccagatgaaaggta

SEQ ID NO: 33761 - DNA, 260 bp, Unknown
  Description of Unknown: RightRegion for integrase B7762 sequence
ataataaagaaaatagaagtaaatgaggagagagaagtttttattcatcttaacttttaaaaaagacagaccaataaattagtctgtctttttcttacattaatataatattattcttgaacaggttttttaataaatcctaagattaaagctgtaactacagaacctactattatagcaactagatacataatagggtttgtcataactggtaatacaaataatccaccatgtggagctggtaattgaactctaaagaa

SEQ ID NO: 33762 - DNA, 140 bp, Unknown
  Description of Unknown: RightRegion for integrase B7763 sequence
tccttcgtgcagtcaatcactgttcacgaggacggagaaatggatattgtttttttatgatcttgtttctactaactacgcaccgcccgtcggttcatcggcaaggatcatttggggatgtaagatcagagcccttgctg

SEQ ID NO: 33763 - DNA, 260 bp, Unknown
  Description of Unknown: RightRegion for integrase B7764 sequence
tccttcgtgcagtcaatcactgttcacgaggacggagaaatggatattgtttttttatgatcttgtttctactaactacgcaccgcctgtcggctcgtcggcaaggataatagcgggctttgtagccaatgcacgggcaatcgctacacgctgctgctgaccgccagacaggttattcggcatatttttgagcttcttttccaaaccgagcgtatgaatgatctgccgaacaaactccgtatcggctttcgctccgtcaa

SEQ ID NO: 33764 - DNA, 221 bp, Unknown
  Description of Unknown: RightRegion for integrase B7765 sequence
tccttcgtgcagtcaatcactgttcacgaggacggagaaatggatattgtttttttatgatcttgtttctactaactacgcacctcctgttggctcatctgccaataagagtttcggattgttgataattgctcttgcacaggcacaacgctgtttttgaccgcccgatacctgataaggatatttgtttagaatatcgctgatattcagctttccggcta

SEQ ID NO: 33765 - DNA, 260 bp, Unknown
  Description of Unknown: RightRegion for integrase B7766 sequence
acgatacaggagatttacctaaatgatgacaatacgattaaagctgtagattttttataatctgttttgtactaagtgtttagccccatttggagccgacaaaacgatgactgctgtactttctggtgaagcagatatcggatttatggggtcggaagcttccatttacacgtataacgaaggcgcttctgactttgttgtaaactttgcccagctcacccagcgcgcaggcaattttcttgttgccagagaagagaggc

SEQ ID NO: 33766 - DNA, 260 bp, Unknown
  Description of Unknown: RightRegion for integrase B7767 sequence
attataaaagaaatacatatcaatacgaaccatgaagtcaccggcatcgatttctattaacccataaaagtgtcttgtactaactataccgccccatttggagcagataaagtcatgaccgccgtcctctccggtgaagccgacatcggattcatgggttctgagtcttcaatctatacctataatgagggggcaaccgattatgttgtaaactttgcccaattgacacagcgtgccggaaactttcttgtctcccgcga

SEQ ID NO: 33767 - DNA, 260 bp, Unknown
  Description of Unknown: RightRegion for integrase B7768 sequence
tccttcgtgcagtcaatcactgttcacgaggacggagaaatggatattgtttttttatgatcttgtttctactaactacgcaccgcccgtcggctcatctgcaaatataatttccggacgattcaccagtgctcttgcaattgctactctctgctgctgtcctccggataactgatttggcagattataaatccggttttcaatccccagagttgcaataatatcatttacatacgcttcatccacttttcttccatcca

SEQ ID NO: 33768 - DNA, 142 bp, Unknown
  Description of Unknown: RightRegion for integrase B7769 sequence
tccttcgtgcagtcaatcactgttcacgaggacggagaaatggatattgtttttttatgatcttgtttctactaactacgcacctcctgtgggttcatctgccagaatgatagcgggtgctgccgccagcgcacgggcaatg

SEQ ID NO: 33769 - DNA, 109 bp, Unknown
  Description of Unknown: RightRegion for integrase B7770 sequence
gagtttgttgaacgtatagaactatttgatgatgaggtaattattaaatataaattttaggtacatagtgttatttacactttgattcagtgatcctttgaaaatcgtt

SEQ ID NO: 33770 - DNA, 260 bp, Unknown
  Description of Unknown: RightRegion for integrase B7771 sequence
cagaaagccgcggagaaaaccagaatccagcaccagaaaaggaaggagcaggaacaatgagcgaagccagaacctatgaacccacagtcacgcgcgtcaaaacggttcgggtcatcccgccgaccattcagccgttatccgacattcctgccttttcagcgcgccccaggcgcgtggcggcttacgcccgtgtctccaccagcagcgaggaacagctgaccagctatgaggcgcaggtgaagcactataccgagtatatc

SEQ ID NO: 33771 - DNA, 260 bp, Unknown
  Description of Unknown: RightRegion for integrase B7772 sequence
tccttcgtgcagtcaatcactgttcacgaggacggagaaatggatattgtttttttatgatcttgtttctactaactacgcaccgcccgtcggctcgtcggccagcacaatagccggttttgtaatcagggcgcgggcaatcgccacacgctgctgctgtccgccggaaagattgttcggcatatttttcagtttatcttccagccccagcaggtgaacgatctcgtccaaaaacttctgatccaccgtgtccccgtcca

SEQ ID NO: 33772 - DNA, 260 bp, Unknown; identical to SEQ ID NO: 33767
  Description of Unknown: RightRegion for integrase B7773 sequence

SEQ ID NO: 33773 - DNA, 139 bp, Unknown
  Description of Unknown: RightRegion for integrase B7774 sequence
tccttcgtgcagtcaatcactgttcacgaggacggagaaatggatattgtttttttatgatcttgtttctactaactacgcaccgcccgtaggctcatcacataaaatggcttccggagatactgcaagcgcccttgcg

SEQ ID NO: 33774 - DNA, 260 bp, Unknown
  Description of Unknown: RightRegion for integrase B7775 sequence
tccttcgtgcagtcaatcactgttcacgaggacggagaaatggatattgtttttttatgatcttgtttctactaactacgcacctcctgtcggttcgtccgccagcagaagctgtggctgtgtgataactgctcttgcaacggcagctctttgcttttgtcctcccgaaacttcatagggatacttctccagcaagtttttgataccaagtttatctgcaagtggaagaagtcttctttccatttctttatgagatgttc

SEQ ID NO: 33775 - DNA, 109 bp, Unknown
  Description of Unknown: RightRegion for integrase B7776 sequence
ataaaaaaaatagatttaatttcaagcaagccgccagaatttaaaatctatttaaaataaaaaggtatactaattatggtgcgaagagagagacttgaactctcacgtc

SEQ ID NO: 33776 - DNA, 94 bp, Unknown
  Description of Unknown: RightRegion for integrase B7777 sequence
acgatacaggagatttacctaaatgatgacaatacgattaaagctgtagattttttataatctgttttgtactaagtgtttagccccatttgga

SEQ ID NO: 33777 - DNA, 142 bp, Unknown
  Description of Unknown: RightRegion for integrase B7778 sequence
tctttcgtgcagtccattactgttcacgaagacggagaaatggatattgtttttttatgatcttgtttctactaactacgcattgcccgtgggttcatctgccagaatgatagcgggtgctgccgccagcgcacgggcaatg

SEQ ID NO: 33778 - DNA, 133 bp, Unknown
  Description of Unknown: RightRegion for integrase B7779 sequence
gagtttgttgaacgtatagaactatttgatgatgaggtaattattaaatataaattttaggtacatagtgttatttacactaataaacaaaatcatatacctaaaatattacatttatacaaatcgatagaca

SEQ ID NO: 33779 - DNA, 260 bp, Unknown
  Description of Unknown: RightRegion for integrase B7780 sequence
tccttcgtgcagtcaatcactgttcacgaggacggagaaatggatattgtttttttatgatcttgtttctactaactacgcacctcctgtcggctcgtcggccagcacaatagccggtttggtaatcaaggcgcgtgcgatagccacacgctgctgctgtccgccggaaagattgttcggcatgtttttcagtttatcttccagccccagcaggtgaacgatctcgtccaaaaacttctgatccaccgtgtccccgtcca

SEQ ID NO: 33780 - DNA, 260 bp, Unknown
  Description of Unknown: RightRegion for integrase B7781 sequence
tcgtgttcggatatagcgtgtgccgctccaccagatgggaagttgcattttagcctttaataaaggggctgagatgtagcttttctttttactgaaacctccatttgaatgctacatcgaatctatccatcaaaatctttgctggcggtttgctgctgtttatatgatatcatatcgggaccgccgacgaaccgcgagctggctatcagcaatagcgtttcagctgatgaatgcaggaaagaaacatcgtaccgggaaaa

SEQ ID NO: 33781 - DNA, 114 bp, Unknown
  Description of Unknown: RightRegion for integrase B7782 sequence
acgatcaagcagatccacctgaatgaagactctacgatcaagtttgttgattttttgtagtgcgtctctgtctgggaggcgcgctccaaacggggttagctagttaggcagaga

SEQ ID NO: 33782 - DNA, 121 bp, Unknown
  Description of Unknown: RightRegion for integrase B7783 sequence
tccttcgtgcagtcaatcactgttcacgaggacggagaaatggatattgtttttttatgatcttgtttctactaactacgcaccgcccgtcggctcatccgctagcactatagacggtctc

SEQ ID NO: 33783 - DNA, 260 bp, Unknown
  Description of Unknown: RightRegion for integrase B7784 sequence
tctttcgtgcagtccattactgttcacgaagacggagaaatggatattgtttttttatgatcttgtttctactaactacgcacctcccgtaggttcgtcggccaggatgatagccggtttagaaacaagggcgcgggcaatcgctacacgctgctgctgaccaccggacagattgttaggcatactgttcagcttttcatcgagagccagcattttcacgacttcattcatgaaatgcttatcaacggtatcaccatcca

SEQ ID NO: 33784 - DNA, 260 bp, Unknown
  Description of Unknown: RightRegion for integrase B7785 sequence
attataaaagaaatacatatcaatacgagccatgaagtcacaggcatcgatttctattaacccataaaagtgtcttgtactaactataccgccccatttggagcagataaagtcatgaccgccgtcctctccggcgaagccgacatcggattcatgggttctgagtcttcaatctatacctataatgagggggcaaccgattatgttgtaaactttgcccaattgacacagcgtgccggaaactttcttgtctcccgcga

SEQ ID NO: 33785 - DNA, 260 bp, Unknown
  Description of Unknown: RightRegion for integrase B7786 sequence
tcctttgtgcagtcaatcactgttcacgaggacggagaaatggatattgtttttttatgatcttgtttttactaactacgcaccgcccgtcggctcatccgccaaaattatcgccggtcttgtcaccaatgccctggctatcgcagttctctgtttctgtccaccagacaaagcagacggcatcgcatctttcttatcctgcagtccgatttttttgagaatatcttccacttcccgcggctttaccttgcgattatcaa

SEQ ID NO: 33786 - DNA, 260 bp, Unknown
  Description of Unknown: RightRegion for integrase B7787 sequence
tccttcgtgcagtcaatcactgttcacgaggacggagaaatggatattgtttttttatgatcttgtttctactaactacgcacctcctgtcggtactgcgtagttagtaaaaacgattcttttgtgcagttttgcttttctctggctccgatcggggcgcgatctgaactttgcaaaaggcaaattgcacaaaaaaagagggccgaacagggaactgctccctgctcggtcctcttttactttctcatcttatttcttca

SEQ ID NO: 33787 - DNA, 141 bp, Unknown
  Description of Unknown: RightRegion for integrase B7788 sequence
acgatacaggagatttacctaaatgatgacaatacgattaaagctgtagattttttataatctgttttgtactaagtgtttagccccatttggagccgacaaaacgatgactgctgtactttctggtgaagcagatatcgg

SEQ ID NO: 33788 - DNA, 260 bp, Unknown
  Description of Unknown: RightRegion for integrase B7789 sequence
tccttcgtgcagtcaatcactgttcacgaggacggagaaatggatattgtttttttatgatcttgtttctactaaccacgcacctcctgtcggttcatcggcaaggatcatttggggatgtaagatcagagcccttgctgccgcaacacgctgacgctggccgccggacatcttggacggaaacttatccagaacatcagtgatttccagatagtcagccaactgcttcagccgctggctgctttctgcttcggataccc

SEQ ID NO: 33789 - DNA, 260 bp, Unknown
  Description of Unknown: RightRegion for integrase B7790 sequence
acgatacaggagatttacctaaatgatgacaatacgattaaggctgtagattttttataatctgttttgtactaagtattcaaccccatttggagtagtataattagtacaaaataaatgatacaatattcaggacggcaactccatccgcccaacactcatatacgccgcccgtaaaaaggtgtgcatcatttcggttgtcaggatcatcctttctggcaaccggaagctaaaagtatttccgggtatctctataaact

SEQ ID NO: 33790 - DNA, 260 bp, Unknown
  Description of Unknown: RightRegion for integrase B7791 sequence
tccttcgtgcagtcaattactgttcacgaggacggagaaatggatattgtttttttatgatcttgtttctactaactacgcacctcccgtcggttcatcggcaaggatcatttggggatgtaagatcagagcccttgctgccgcaacacgctgacgctggccaccggacatcttggacggaaacttatccagaacatcagaaatttccagatagtcagccaactgcttcagccgctggctgctttctgtttcggctaccc

SEQ ID NO: 33791 - DNA, 260 bp, Unknown
  Description of Unknown: RightRegion for integrase B7792 sequence
acgatacaggagatttacctaaatgatgacaatacgattaaagctgtagattttttataatctgttttgtactaagtgtttagccccatttggagccgataaaaccatgacggctgtactgtccggcgaggcagatatcggctttatgggctcagaagcttccatttatacttacaacgaaggggcttctgattttgttgtaaattttgcacagctcacccagcgcgccggtaattttcttgttgccagagaagaaatgc

SEQ ID NO: 33792 - DNA, 260 bp, Unknown
  Description of Unknown: RightRegion for integrase B7793 sequence
gtcattaaagaaattagaattgataatgaccagaatatcacgggtgttgtttttgggtagtgttgtactaatgtaacactacccgtcggttcatctgccagaatcagctgcggacgggtgatcagtgcgcgggcaaccgccgccctctgcttctgtccgccggaaacctcataaggatatttctcaagcagcacatcgatcccaagcttttcggcaatcggccaaagccgctcctccatctcctgcaccggtgcatctgc

SEQ ID NO: 33793 - DNA, 260 bp, Unknown
  Description of Unknown: RightRegion for integrase B7794 sequence
ataataaagaaaatagaagtaaatgaagagagagaagtttttattcatcttaacttttaaaaaagacagaccaataaattagtctgtctttttcttacattaatataatattattcttgaacaggttttttaataaatcctaagattaaagctgtaactacagaacctactattatagcaactagatacataatagggtttgtcataactggtaatacaaataatccaccatgtggagctggtaattgaactctaaagaa

SEQ ID NO: 33794 - DNA, 109 bp, Unknown
  Description of Unknown: RightRegion for integrase B7795 sequence
acaatacgggaaatttatctaaacgaagacaatacgattaaatgcgttgattttatttagtccgtcttgtactaaacatctagctccatttggagccgacaaaacgatg

SEQ ID NO: 33795 - DNA, 260 bp, Unknown
  Description of Unknown: RightRegion for integrase B7796 sequence
tccttcgtgcagtcaatcactgttcacgaggacggagaaatggatattgtttttttatgatcttgtttctactaactacgcaccgcccgtaggttcatctgccaggatcaccggtggctgggccgcgattgctcttgcaatagccaccctctgctgctgtcctcctgacatttcatttggtctgtgatccatacgtttctcaagccctaccatggtcagtgactctactgccagcttatgtctcgtttttctgtctaccc

SEQ ID NO: 33796 - DNA, 109 bp, Unknown
  Description of Unknown: RightRegion for integrase B7797 sequence
acaatacgggaaatttatctaaacgaagacaatacgattaaatgcgttgattttatttagtccgtcttgtactaaacatctaactccatttggagccgacaaaacgatg

SEQ ID NO: 33797 - DNA, 260 bp, Unknown
  Description of Unknown: RightRegion for integrase B7798 sequence
acgatcaagcagatccacctgaatgaagactctacgatcaagtttgttgattttttgtagtgcgtctctgtcgaggaggcgcgctccaaacggggttagctagttaggcagagacttctatataataatagcctgatagcctttggttttcaactctttaacaagcttctccgcgttccctttcgacttaaatgcaccgacctgaacccggtagatcttatctgcagcctctgtcttcgcgaatgcagacgcacccaccg

SEQ ID NO: 33798 - DNA, 109 bp, Unknown
  Description of Unknown: RightRegion for integrase B7799 sequence
attataaaagaaatacatatcaatacgagccatgaagtcacaggcatcgatttctattaacccataaaagtatcttgtactaactataccgccccatttggagcagata

SEQ ID NO: 33799 - DNA, 109 bp, Unknown
  Description of Unknown: RightRegion for integrase B7800 sequence
attataaaagaaatacatatcaatacgagccatgaagtcacaggcatcgatttctattaacccataaaagtgtcttgtactaactataccgccccatttggagcagata

SEQ ID NO: 33800 - DNA, 143 bp, Unknown
  Description of Unknown: RightRegion for integrase B7801 sequence
tccttcgtgcagtcaatcactgttcacgaggacggagaaatggatattgtttttttatgatcttgtttctactaactacgcacctcctgtcggttcatcggcaaggatcatttggggatgtaagatcagagcccttgctgccg

SEQ ID NO: 33801 - DNA, 260 bp, Unknown
  Description of Unknown: RightRegion for integrase B7802 sequence
tccttcgtgcagtcaatcactgttcacgaggacggagaaatggatattgtttttttatgatcttgtttctactaactacgcaccgcccgttggctcatctgccaataagagtttcggattgttgataattgctcttgcacaggcacaacgctgtttttgaccgcccgatacctgataaggatatttgtttagaatatcgctgatattcagctttccggctatatccaaaatgctgggttctacactcccggcagggactt

SEQ ID NO: 33802 - DNA, 141 bp, Unknown
  Description of Unknown: RightRegion for integrase B7803 sequence
acgatacaggagatttacctaaatgatgacaatacgattaaagctgtagattttttataatctgttttgtactaagtgtttagcctcatttggagccgacaaaacgatgactgctgtactttctggtgaagcagatatcgg

SEQ ID NO: 33803 - DNA, 109 bp, Unknown
  Description of Unknown: RightRegion for integrase B7804 sequence
acgatacaggagatttacctaaatgatgacaatacgattaaggctgtagattttttataatctgttttgtactaagtattcaaccccatttggagccgacaaaacgatg

SEQ ID NO: 33804 - DNA, 260 bp, Unknown
  Description of Unknown: RightRegion for integrase B7805 sequence
acgatacaggagatttacctaaatgatgacaatacgattaaagctgtagattttttataatctgttttgtactaagtgtttagccccatttggggatgtatacttagtacaaaataaatgatacaatattctcaggacggcaactccatccgtccaacactcatatacgcagcccgtaaaaaggtgtgcatcatttcggttgtcaggatcatcccttctggcaaccggaacttaaaagtatttccgggtatctccataaa

SEQ ID NO: 33805 - DNA, 260 bp, Unknown
  Description of Unknown: RightRegion for integrase B7806 sequence
tctttcgtgcagtccattactgttcacgaagacggagaaatggatattgtttttttatgatcttgtttctactaactacgcaccgcccgtaggttcatcacagagaagaatatccggattcttgacgatcgcacggccaattgcagtcctctgctgctgaccacccgataactggttcggtagctttttctgatgatctgtaagtcccaggatctgcagaagctcatccacatccagcgcatggtcacttaaatatgccc

SEQ ID NO: 33806 - DNA, 109 bp, Unknown
  Description of Unknown: RightRegion for integrase B7807 sequence
acaatccaggaaatttatctaaacgaagacaatacgattaaaggtgttgattttatttagtgcgtcttgcactaaacatctagccccatttggagccgacaaaacgatg

SEQ ID NO: 33807 - DNA, 260 bp, Unknown
  Description of Unknown: RightRegion for integrase B7808 sequence
acgatacaggagatttacctaaatgatgacaatacgattaaggctgtagattttttataatctgttttgtactaagtattcaaccccatttggagtagtataattagtacaaaataaatgatacaatattcaggacggcaactccatccgtccaacactcatatacgccgcccgtaaaaaggtgtgcatcatttcggttgtcagcgtcataccttctggcaaccggaacttgaatgtattacctggtatctccaaaaact

SEQ ID NO: 33808 - DNA, 143 bp, Unknown
  Description of Unknown: RightRegion for integrase B7809 sequence
tccttcgtgcagtcaatcactgttcacgaggacggagaaatggatattgtttttttatgatcttgtttctactaactacgcaccgcccgtcggctcatctgcaaatataatttccggacgattcaccagtgctcttgcaattg

SEQ ID NO: 33809 - DNA, 260 bp, Unknown
  Description of Unknown: RightRegion for integrase B7810 sequence
tccttcgtgcagtcaatcactgttcacgaggacggagaaatggatattgtttttttatgatcttgtttctactaactacgcaccgcccgttggttcatctgccaaaagcagtttgggattgttgataattgccctggcacacgcacaacgctgcttctggccgccggaaacctgatagggatacttgtttaaaatatccgtgatattgagcttttgggcaatgtcttggatacgcggatccacatctctggcgggcgttt

SEQ ID NO: 33810 - DNA, 260 bp, Unknown
  Description of Unknown: RightRegion for integrase B7811 sequence
tctttcgtgcagtccattactgttcacgaagacggagaaatggatattgtttttttatgatcttgtttctattaactacgcattgcctgtcggtactgcatagttagtaaaaacgattcttttgtgcagttttgcttttctctggctacgatcggggcgcgatctggactttgcaaaaggcaaattgcacaaaaaagagggccgaacagggaactgctccctgcccggtcctcttttactttctcatcttatttcttcag

SEQ ID NO: 33811 - DNA, 260 bp, Unknown; identical to SEQ ID NO: 33755
  Description of Unknown: RightRegion for integrase B7812 sequence

SEQ ID NO: 33812 - DNA, 260 bp, Unknown
  Description of Unknown: RightRegion for integrase B7813 sequence
tccttcgtgcagtcaatcactgttcacgaggacggagaaatggatattgtttttttatgatcttgtttctactaactacgcaccgcccgtcggtactgcgtagttagtaaaaacgattcttttgtgcagttttgcttttctccggctccgatcggggcgcgatctggactttgtaaaaggcaaattgcacaaaaaagagggccgaacagggaactgctccctgcccggtcctcttttactttctcatcttatttcttcag

SEQ ID NO: 33813 - DNA, 260 bp, Unknown
  Description of Unknown: RightRegion for integrase B7814 sequence
acgatcaagcagattcacctaaatgaagactctacgatcaagtttgttgattttttgtagtgcgtctctgtctgggaggcgcgctccaaaagggcatcccttagaaagcagaacttctatagatctcaaagacactctcgcttatccgcatatcgtcttttccaagcgaagcggcttaagacaggtcattgataaactatttaaaaaatgtggcggttatccggagattgcttattctatggaagaagatcagggtgttg

SEQ ID NO: 33814 - DNA, 260 bp, Unknown
  Description of Unknown: RightRegion for integrase B7815 sequence
tccttcgtgcagtcaatcactgttcacgaggacggagaaatggatattgtttttttatgatcttgtttctactaactacgcaccgcccgtgggttcatctgccagaatgatagcgggtgctgccgccagcgcacgggcaatggctactcgctgctgttgaccgcctgagagctgattgggcagggcatccagacggtcgctcagtccaagcgtctgcacgatctgctgcacaaaagccttgtttacctttccgccatcca

SEQ ID NO: 33815 - DNA, 260 bp, Unknown
  Description of Unknown: RightRegion for integrase B7816 sequence
tccttcgtgcagtcgatcactgttcacgaggacggagaaatggatattgtttttttatgatcttgtttctactaactacgcactgcctgtcggtactgcgtagttagtaaaaacgattcttttgtgcagttttgcttttctctggctccgatcggggcgcgatctggactttgcaaaaggcaaattgcacaaaaaaagagggccgaacagggaactgctccctgctcggtcctcttttactttctcatcttatttcttca

SEQ ID NO: 33816 - DNA, 260 bp, Unknown
  Description of Unknown: RightRegion for integrase B7817 sequence
tccttcgtgcagtcaatcactgttcacgaggacggagaaatggatattgtttttttatgatcttgtttctactaactacgcaccgcccgtcggtactgcgtagttagtagaaacgatttttttgtgcagttttgcttttctctggctccgatcggggcgcgatctggactttgcaaaaggcaaattgcacaaaaaagagggccgaacagggaactactccctgcccggtcctcttttactttctcatcttatttcttcag

SEQ ID NO: 33817 - DNA, 109 bp, Unknown
  Description of Unknown: RightRegion for integrase B7818 sequence
acgatacaggagatttatctaaatgatgacaatacgattaaagctgtagattttttataatctgttttgtactaagtgtttagccccatttggagccgataaaacaatg

SEQ ID NO: 33818 - DNA, 260 bp, Unknown
  Description of Unknown: RightRegion for integrase B7819 sequence
tccttcgtgcagtcgatcactgttcacgaggacggagaaatggatattgtttttttatgatcttgtttctactaactacgcacctcctgtcggctcatctgcaaggatcagcttgggctgcgtgatcagcgctcttgccactgccgccctttgtttctgaccgccggatacttcatatggaaacttcttcaaaagttgagtgattccaagctgctgtgcaattggtttgagtttctgactcatctccggatactttttgc

SEQ ID NO: 33819 - DNA, 260 bp, Unknown
  Description of Unknown: RightRegion for integrase B7820 sequence
tccttcgtgcagtcaatcactgttcacgaggacggagaaatggatattgtttttttatgatcttgtttctactaactacgcaccgcctgtcggttcatctgctaaaatcaggttagcatccatcataagtcctctggcaattgcaactctttgtttttgccctccacttaacgtctgtactttccgattcattaactctgcaatatgcaaatattccaaaatttcctgcgcgcgtatatttgcactttttatgcttcttt

SEQ ID NO: 33820 - DNA, 260 bp, Unknown
  Description of Unknown: RightRegion for integrase B7821 sequence
tccttcgtgcagtcaatcactgttcacgaggacggagaaatggatattgtttttttatgatcttgtttctactaactacgcaccgcccgtcggtactgcgtagttagtaaaaacgattcttttgtgcagttttgcttttctccggctccgatcagggcgcgatctggacttcgtaaaaggcaaattgcacaaaaaaagagggccgaacaggggactgctccctgcccggtcctcttttgctctctcatcttatttcttca

SEQ ID NO: 33821 - DNA, 260 bp, Unknown
  Description of Unknown: RightRegion for integrase B7822 sequence
tctttcatcaaatctattgtcgtctacgaagatggcagtatggacattaattttttatgattttttatttatactaactatacctaaccatttggttatcaatagttagtataaatgttgttttgtgcattttgcctttttctttgctgtgatctgtgtctgatcgtagccgtctcgttgtcaatttgcacaaaaggcaacgactttcccggtcgctgccttcttttaaattattccatttcttttatgattgttttttc

SEQ ID NO: 33822 - DNA, 260 bp, Unknown
  Description of Unknown: RightRegion for integrase B7823 sequence
tccttcgtgcagtcaatcactgttcacgaggacggagaaatggatattgtttttttatgatcttgtttctactaactacgcaccgcccgtcggtactgcgtagttagtaaaaacgattcttttgtgcagttttgcttttctctggctctgatcggggcgagatctggacttcgcaaaaggcaaattgcacaaaaaagagggccgaacagggaactgctccctgcccggtcctcttttactttctcatcttatttcttcag

SEQ ID NO: 33823 - DNA, 143 bp, Unknown; identical to SEQ ID NO: 33808
  Description of Unknown: RightRegion for integrase B7824 sequence

SEQ ID NO: 33824 - DNA, 190 bp, Unknown
  Description of Unknown: RightRegion for integrase B7825 sequence
tccttcgtgcagtcaatcactgttcacgaggacggagaaatggatattgtttttttatgatcttgtttctactaactacgcacctcctgttggctcgtcggccagcacaatagccggtttggtaatcagggcgcgtgcgatagccacacgctgctgctggccgccggaaagattgttcggcatatttttc

SEQ ID NO: 33825 - DNA, 109 bp, Unknown
  Description of Unknown: RightRegion for integrase B7826 sequence
attataaaagaaatacatatcaatacgagccatgaggtcaccggcatcgatttctattaaccaataaaagtgtcttgtactaactataccgccccatttggagcagata

SEQ ID NO: 33826 - DNA, 260 bp, Unknown
  Description of Unknown: RightRegion for integrase B7827 sequence
tccttcgtgcagtcaatcactgttcacgaggacggagaaatggatattgtttttttatgatcttgtttctactaactacgcaccgcccgtcggctcatcagccaaaataatatctggattagaaatcaaactacgggctgcggctacacgctgcttttgaccgccggacatttgcgccggaaactttgaaagaacatcaataattccaagaaatccggctatatcatttaggtgcttttcggctatggaactatctatat

SEQ ID NO: 33827 - DNA, 260 bp, Unknown
  Description of Unknown: RightRegion for integrase B7828 sequence
tctttcgttgaatctattatagtctatgaagatggcagcatggacattaattttttatgattttttatttatactaactatacctaaccgtttggccagcctgcatagaatgctacgtgggtgatgatcgctgcgatttctttctgtgttaccccatgatcctttgcattctgtaaatggaatttcagagaagaatctgtaattccctgtgccatcagtgctacgactgtgataatgcttcttgtctttaaatcaatatc

SEQ ID NO: 33828 - DNA, 260 bp, Unknown
  Description of Unknown: RightRegion for integrase B7829 sequence
tccttcgtgcagtcaatcactgttcacgaggacggagaaatggatattgtttttttatgatcttgtttctactaactacgcacctcctgttggctcatctgctaaaataatagctggctttgttgcaagagcccttgcgatcgcaactctttgctgttgtccaccagataatgttcccggaagcatatctttcttctccgatatccgcaaaagcttcaatattccattcacatattctgtatcaacttttcttccatcaa

SEQ ID NO: 33829 - DNA, 260 bp, Unknown
  Description of Unknown: RightRegion for integrase B7830 sequence
tccttcgtgcagtcaatcactgttcacgaggacggagaaatggatattgtttttttatgatcttgtttctactaactacgcaccgcccgtaggttcgtcggccaggatgatagccggtttagaaacaagggcgcgggcaatcgctacacgctgctgctgaccaccggacagattgttaggcatactgttcatctttccatcgagagccagcattttcacgacttcattcatgaaatgcttatcaacggtatcaccatcca

SEQ ID NO: 33830 - DNA, 109 bp, Unknown
  Description of Unknown: RightRegion for integrase B7831 sequence
ataataaagaaaatagaagtaaatgaagagagagaagtttttattcatcttaacttttaaaaaagacagaccaataaattagtctgtctttttcttacattaatataat

SEQ ID NO: 33831 - DNA, 260 bp, Unknown
  Description of Unknown: RightRegion for integrase B7832 sequence
attatccgggagattcacctgaatactgatcataccgttgactctgttgatttcttatagcgtcttgtactaactggttgactccgtttggggcggataaagttatgaccgccgtcctctccggtgaggcagatattggctttatgggaagtgaatcttcgatttatacttaccaggagggtgcaaatgatgtcatcaaaaacttcgcgcagcttacgcagcgcgccggaaactttctggtcgcacgtgaagaaatgccg

SEQ ID NO: 33832 - DNA, 260 bp, Unknown
  Description of Unknown: RightRegion for integrase B7833 sequence
atcattcaggaaatccatataaatgaagacagtaccataacctccgtcgattttctgtgatgtgtcttgtactaactatactgttccattcggagccgacaaaactatgacggccgtcctctccggaactgccgacatcggctttatgggttcggaagcttctatctacacatataacgagggggcgaatgattatgttgtaaactttgcccagctcacccagcgcgccgggaacttcctggttgccagggaagatatta

SEQ ID NO: 33833 - DNA, 260 bp, Unknown
  Description of Unknown: RightRegion for integrase B7834 sequence
tctttcgttgaatctattatagtctatgaagacggcagcatggacattaattttttatgattttttatttatactaactatacctaaccgtttggttacaaatagttagtataaatatcttttttgtgcaatttgtcttttgtgtggctccgatccggctctgatccatacacttccggaggcataatgcacaaaaggcagcgatcttttgaccgctgccctctttttttactcttcgatttccacttctgtgatctgtg

SEQ ID NO: 33834 - DNA, 260 bp, Unknown
  Description of Unknown: RightRegion for integrase B7835 sequence
gaaatccgtgtatcaaagagtattgggcggaaccggaaatatcaaattatctttttgtaattgttttaccgttaagttaagtttccggtatgctgattcattccagtcatttcattaaataccgtactcttccccacattcgggttacctgccagcgcgatgaccttatcatcttcccggcgttttttgatttcaagtccacagtccacagacttgatccccacagaatctctgcttaaccccataatacgtcctccgtt

SEQ ID NO: 33835 - DNA, 260 bp, Unknown; identical to SEQ ID NO: 33831
  Description of Unknown: RightRegion for integrase B7836 sequence

SEQ ID NO: 33836 - DNA, 137 bp, Unknown
  Description of Unknown: RightRegion for integrase B7837 sequence
tccattgtcaaggaaatccgtgttgaccatgacaaaaacattcatattatttttttatgattgttatactactaactgaacccctccggtcggctcatctgcaaatataatttccggacgattcaccagtgctcttg

SEQ ID NO: 33837 - DNA, 221 bp, Unknown
  Description of Unknown: RightRegion for integrase B7838 sequence
tccattgtcaaggaaatccgtgttgaccatgacaaaaacattcatattatttttttgtgattgttatactactaactgaacccctccggtcggctcgtcggccagcacaatagccggtttggtaatcaaggcgcgggcaatcgccacacgctgctgctggccgccggaaagattgttcggcatatttttcagtttatcttccagccccagcaggtgaacga

SEQ ID NO: 33838 - DNA, 109 bp, Unknown
  Description of Unknown: RightRegion for integrase B7839 sequence
attatccgggagattcacctgaatgctgatcataccgttgactctgttgatttcttatagcgtcttgtactaactggttgactccgtttggggcggataaagttatgac

SEQ ID NO: 33839 - DNA, 109 bp, Unknown
  Description of Unknown: RightRegion for integrase B7840 sequence
attatccgggagattcacctgaatactgatcataccgttgactctgttgatttcttatagcgtcttgtactaactggttgactccgtttggggcggataaagttatgac

SEQ ID NO: 33840 - DNA, 260 bp, Unknown
  Description of Unknown: RightRegion for integrase B7841 sequence
acgatccggcagatctatttaaaaccagattatacgattgactatgttgattttatttaatctgtctgtgcctaaattgtcatccccgtttggagccgataaaacaatgactgccgttatttccggagaagccgatattggatttatgggatctgaagcttccgtttatatgtacagcgaaggagcttccgactatgtcgttaattttgcacagctcacacagcgagccggaaactttctcgttgcacggcaagacaacg

SEQ ID NO: 33841 - DNA, 260 bp, Unknown
  Description of Unknown: RightRegion for integrase B7842 sequence
tcttttattgaatctatccttgtgcacgaagatggaagcatggatatttcttttttgtagctttgtttttactaactacgcaccgcccgtaggctcgtcgcagagcaggatgtccggattttttacaatggcacggccaatggcagttctctgctgctggcctccggaaagctgattgggaagtttccgctgatgttcataaagtcccagggttccaagcagttcatccacatccagcggcctgtcacttaaataggcgc

SEQ ID NO: 33842 - DNA, 260 bp, Unknown; identical to SEQ ID NO: 33831
  Description of Unknown: RightRegion for integrase B7843 sequence

SEQ ID NO: 33843 - DNA, 260 bp, Unknown
  Description of Unknown: RightRegion for integrase B7844 sequence
tcgtttgttgaatcggtgctggtgtatgaggatggaagcatggacattcgttttttgtagtctttgtcgtactaactatgcaccgcctgtcggctcgtcggccagcacgatagccggtttggtaatcagggcgcgtgcaatcgccacacgctgctgctgtccgccggaaagattattcggcatatttttcagtttatcttccagccccagcaggtgaacgatctcgtccaaaaacttctgatccaccgtgtccccgtcca

SEQ ID NO: 33844 - DNA, 260 bp, Unknown
  Description of Unknown: RightRegion for integrase B7845 sequence
atcattcaggagattcacgtgaatgaagacaacgccataacctctgtcgattttctgtgatgcgtcttgtactaactatactgttccattcggagccgacaaaactatgacggccgtcctctccggaactgccgacatcggctttatgggttcggaagcttctatctacacatataacgagggggcgaatgattatgttgtaaactttgcccagctcacccagcgcgccgggaacttcctggttgccagggaagatatta

SEQ ID NO: 33845 - DNA, 260 bp, Unknown
  Description of Unknown: RightRegion for integrase B7846 sequence
tgcttaattgtaaatcgtataataataaaaaccctagaagatatagaagttatcttctagggttttattcttacttttctattaataagtttttatgagtccatccttctttagaatcatatttaatttttatccattctttttctgagtctactctctcaacaaattgattttttttcactattctttttattctggcttgtgaacttggaaactctcttataataactgagtctgatattgttaaataatattttttt

SEQ ID NO: 33846 - DNA, 260 bp, Unknown
  Description of Unknown: RightRegion for integrase B7847 sequence
tccattgtcaaagaaatccgtgttgaccatgacaaaaacattcatattatttttttgtgattgttatactactaactgaacccctccggtcggttcatcggcaagtatgatatctgcattagtcaccaacgcccttgctatcgcaaccctctgctgctgtccacctgacatctttcccggaagcttatttctttccgataatattccaagatgttccatctgctttaatataatcattttcctgtcctttcgctttacat

SEQ ID NO: 33847 - DNA, 260 bp, Unknown
  Description of Unknown: RightRegion for integrase B7848 sequence
tccattgtcaaggaaatccgtgttgaccatgacaaaaacattcatattatttttttgtgattgttatactactaactgaacccctcctgtcggttcgtccgccagaatgatcttcggttctgtgatcagtgctcttgcgattgctgcacgctgtttctgaccgccggacacttcatacggatatttctccagaagcttttcaatggacagtctgcgtgaaagttccatcattttcggtgccatttcactgtaagtctttc

SEQ ID NO: 33848 - DNA, 260 bp, Unknown
  Description of Unknown: RightRegion for integrase B7849 sequence
attatccgggagattcacctgaacactgatcatactgtcgactctgttgatttcttatagcgtcttgtactaactggttgactccgtttggggtagtttagttagtacaagacaatatttattatttcacccgcagtctctgaccaacatagatcacattcggattgctgattccattcagctgcgcaaccttctggtaggacgtgccgtatttagctgcaataccggaaagcgtatctccgctctgcacgatgtaatac

SEQ ID NO: 33849 - DNA, 260 bp, Unknown
  Description of Unknown: RightRegion for integrase B7850 sequence
atcattcaggagattcatgtgaacgaagaccatgccataacctctgtcgattttctgtgatgcgtcttgtactaactatgctgttccattcggtgccgacaagaccatgactgctgtcctttccggaacagccgacatcggatttatgggatcagaagcttccatttatacttataatgaaggggctcatgattatgtcgtgaattttgcacagctcactcagcgagccggaaacttcctggttgccaaagaggatatta

SEQ ID NO: 33850 - DNA, 260 bp, Unknown
  Description of Unknown: RightRegion for integrase B7851 sequence
tccattgtcaaggaaatccgtgttgaccatgacaaaaacattcatattatttttttgtgattgttatactactaactgaacccctccggtcggttcatcagcaaggataatcgcaggcttcgtaattaaagctcgtgcaatcgctacacgttgctgttgaccgcctgaaagattgttcggcatattttccagtttatcttctaaagccaacatatacacaacttcgtccataaatttctggtctactgtatcgccatcca

SEQ ID NO: 33851 - DNA, 260 bp, Unknown
  Description of Unknown: RightRegion for integrase B7852 sequence
tccattgtcaaggaaatccgtgttgaccatgacaaaaacattcatattatttttttgtgattgttatactactaactgaacccctccggtgggttcatccgcaagaattatggcaggctctgccgccaatgctctggctatggcaactctctgctgttgtcctcctgagagctgatttggaagagcgtcaagtctctggtcgagccccagtgtctctgttattttttttacaaattccttatcgactttaccgccatcca

SEQ ID NO: 33852 - DNA, 260 bp, Unknown
  Description of Unknown: RightRegion for integrase B7853 sequence
tccattgtcaaggaaatccgtgttgatcatgacaaaaacattcatattatttttttgtgattgttatactactaactgaacccctccggtcggttcatcagcaaggataatcgcaggcttcgtaattaaagctcgtgcaatcgctacacgttgctgttgaccgcctgaaagattgttcggcatattttccagtttatcttctaaagccaacatatacacaacttcgtccataaatttctggtctactgtatcgccatcca

SEQ ID NO: 33853 - DNA, 260 bp, Unknown
  Description of Unknown: RightRegion for integrase B7854 sequence
tcgtttgttgaatcggtgctggtgtatgaggatggaagcatggacattcgttttttgtagtctttgtcgtactaactatgcaccgcctgtaggctcatcagcaagaataagctttggattagtaataatggctcttgcacttgccactctctgcttctgtcctcctgacatctgataaggatatttgtttaatacatcttcaattcctagctctcttgcagtctgtcttactcttaattcaatctcccttgacggaacat

SEQ ID NO: 33854 - DNA, 260 bp, Unknown; identical to SEQ ID NO: 33840
  Description of Unknown: RightRegion for integrase B7855 sequence

SEQ ID NO: 33855 - DNA, 260 bp, Unknown
  Description of Unknown: RightRegion for integrase B7856 sequence
tcgtttgttgaatcggtgctggtgtatgaggatggaagcatggacattcgttttttataatctttgtcgtactaactctgcaccgcctgttggctcatcagccaaaattaattcgggatttgttattatcgcacgtgccactgctgccctttgcttctgtcctcctgacacctcgtatggatatttattaagcagcttttcaattccaagcagtgaagctataggtgcaagccttttttccatatccctataatccacac

SEQ ID NO: 33856 - DNA, 260 bp, Unknown
  Description of Unknown: RightRegion for integrase B7857 sequence
atcattcaagagattcatgtgaatgaggaccatgccataacctccgtcgattttctgtgatgcgtcttgtactaactatactgttccatttggcgccgacaagaccatgactgctgtcctttccggaacagccgacatcggatttatgggatcggaagcttccatttatacttataatgaaggggctcatgattatgtcgtaaactttgcacagctcactcagcgtgccggaaactttctggttgccagagatgatatta

SEQ ID NO: 33857 - DNA, 260 bp, Unknown
  Description of Unknown: RightRegion for integrase B7858 sequence
tccattgtcaaggaaatccgtgttgaccatgacaaaaacattcatattatttttttgtgattgttatactactaactgaacccctccggtcggctcatctgcaaatataatttccggacgattcaccagtgctcttgcaattgctactctctgctgctgtcctccggataactgatttggcagattataaatcctcttttcaatccccagagttgcaataatatcatttacatacgcttcatccacttttcttccatcca

SEQ ID NO: 33858 - DNA, 260 bp, Unknown
  Description of Unknown: RightRegion for integrase B7859 sequence
tccattgtcaaggaaatccgtgttgaccatgacaaaaacattcatattatttttttatgattgttatactactaactgaacccctccggtcggtaggttcaatttagtagtatgaaaatctctgttattttttacgtattttacgtatatttttattgacattacgtaaaatacgtgttattatatacttgtaaggaggaaacaatacaaatgagatttcgagaaattgaaaaaatagtcctcaatgacggatgggagtt

SEQ ID NO: 33859 - DNA, 109 bp, Unknown
  Description of Unknown: RightRegion for integrase B7860 sequence
attatccggaagattcacctgaacactgatcatactgtcgactctgttgatttcttatagcgtcttgtactaactggttgactccgtttggggcggataaagttatgac

SEQ ID NO: 33860 - DNA, 109 bp, Unknown
  Description of Unknown: RightRegion for integrase B7861 sequence
atcattcaggaaatccatataaatgaagacagtaccataacctccgtcgattttctgtgatgcgtcttgtactaactatactgttccattcggagccgacaaaactatg

SEQ ID NO: 33861 - DNA, 109 bp, Unknown
  Description of Unknown: RightRegion for integrase B7862 sequence
atcattcaggagattcatgtgaacgaagaccatgccataacctccgtcgattttctgtgatgcgtcttgtactaactatactgttccattcggtgccgacaagaccatg

SEQ ID NO: 33862 - DNA, 260 bp, Unknown
  Description of Unknown: RightRegion for integrase B7863 sequence
accatagaggaaattcatttgaatgaagattacacggtagaaagtgttgactttttgtagtgtcttgtactaagtttattactccgtttggagcggataaaactatgacctctgtcctctccggaaatgctgatatcggattcatgggttctgaagcttccatctacacttataacgagggcgcgaatgactatgtggtaaatttcgcccaacttacacagagagccgggaactttctggtcgctcgtgagaaaattgat

SEQ ID NO: 33863 - DNA, 109 bp, Unknown
  Description of Unknown: RightRegion for integrase B7864 sequence
accataggggaaattcatttgaatgaagattacacggtagaaagtgttgactttttgtagtgtcttgtactaagtttattgctccgtttggagcggataaaactatgac

SEQ ID NO: 33864 - DNA, 260 bp, Unknown
  Description of Unknown: RightRegion for integrase B7865 sequence
attatccgggagattcacctgaacactgatcatactgtcgactctgttgatttcttatagcgtcttgtactaactggttgactccgtttggggcggataaagttatgaccgccgtcctctccggtgaggcagatattggctttatgggaagtgaatcttcgatttatacttaccaggagggtgcaaatgatgtcatcaaaaacttcgcgcagcttacgcagcgcgccggaaactttctggtcgcacgtgaagaaatgccg

SEQ ID NO: 33865 - DNA, 260 bp, Unknown
  Description of Unknown: RightRegion for integrase B7866 sequence
attatccgggagattcacctgaatactgatcataccgttgactctgttgatttcttatagcgtcttgtactaactggttgactccgtttggggcggataaagttatgaccgccgtcctctccggtgaggcagatattggctttatgggaagtgaatcttcgatttatacttaccaggaaggtgcaaatgatgtcatcaaaaactttgcgcagcttacgcagcgcgccggaaactttctggtcgcacgtaaagaaatgctg

SEQ ID NO: 33866 - DNA, 260 bp, Unknown
  Description of Unknown: RightRegion for integrase B7867 sequence
attatccgggagattcacctgaatgctgatcataccgtcgactctgttgattttctatagcgtcttgtactaactggttgactccgtttggggcggataaagttatgaccgccgtcctctccggtgaggcagatattggctttatgggaagtgaatcttcgatttatacttaccaggagggtgcaaatgatgtcgtcaaaaacttcgcgcagcttacgcagcgcgccggaaactttctggtcgcacgtgaagaaatgccg

SEQ ID NO: 33867 - DNA, 260 bp, Unknown; identical to SEQ ID NO: 33831
  Description of Unknown: RightRegion for integrase B7868 sequence

SEQ ID NO: 33868 - DNA, 260 bp, Unknown
  Description of Unknown: RightRegion for integrase B7869 sequence
tcgtttgttgaatcagtgctggtgtatgaggacggaagcatggacattcgttttttgtaatctttgtcgtactaactatgcaccgcctgtcggtactgctttgttagtacaatcaatatattgtggttatccacacagttatcctctatatgtggataaaataaaagcaaggcggcgcattgtccgtcttgcttctcttttactccaaaattatcgacattattcttcgatgtattcaaccagcttcggatcgccgctga

SEQ ID NO: 33869 - DNA, 260 bp, Unknown
  Description of Unknown: RightRegion for integrase B7870 sequence
tctatcattcgtgagatccgcgtggatcatgagagaaatgtccgtattatttttttgtgatttttatactactaacttacaccgtcctgtcggtaactttaatttagtagtagtataaatattttgctttcaaaataagcgggaatgctttttagttattcccgcttatttatcatctaatactacttttatttttcttgtcataatctgttgggattacatgccaccctttataactatatcctggacgttgtccttcc

SEQ ID NO: 33870 - DNA, 260 bp, Unknown; identical to SEQ ID NO: 33864
  Description of Unknown: RightRegion for integrase B7871 sequence

SEQ ID NO: 33871 - DNA, 109 bp, Unknown
  Description of Unknown: RightRegion for integrase B7872 sequence
atcattcaggaaatccatataaatgaagacagtaccataacctccgtcgattttctgtgatgtgtcttgtactaactatactgttccattcggagccgacaaaactatg

SEQ ID NO: 33872 - DNA, 260 bp, Unknown
  Description of Unknown: RightRegion for integrase B7873 sequence
attatccgggagattcacctgaatactgatcataccatcgactctgttgatttcttatagcgtcttgtactaactggttaactccgtttggggcggataaagttatgaccgccgtcctctccggtgaggcagatattggctttatgggaagtgaatcttcgatttatacttaccaggagggtgcaaatgatgtcatcaaaaacttcgcgcagcttacgcagcgcgccggaaactttctggtcgcacgtgaagaaatgccg

SEQ ID NO: 33873 - DNA, 260 bp, Unknown
  Description of Unknown: RightRegion for integrase B7874 sequence
tcttttattgacaaaattgtaattgatgtgaacggtaatatagatattatttttttgtgattttattggtactaacatacccgcccccgtcggtgcttcaataaaggctatgttggtatctttatttttaagcagcgtctgctcagcttcataaaacatgcgattccgcaaaatattaatatcctttttatcatcaacacagctctccggattcaatctgcgaatctgttttacccgctccgactgctcatactgtgtgg

SEQ ID NO: 33874 - DNA, 260 bp, Unknown
  Description of Unknown: RightRegion for integrase B7875 sequence
attatccgggagattcacctgaacactgatcatactgtcgactctgttgatttcttatagcgtcttgtactaactggttgactccgtttggggcggataaagttatgaccgccgtcctctctggcgaggcagatattggctttatgggaagtgaatcttcgatttatacttaccaggagggtgcaaatgatgtcatcaaaaacttcgcgcagcttacgcagcgcgccggaaactttctggtcgcacgtgaagaaatgccg

SEQ ID NO: 33875 - DNA, 260 bp, Unknown
  Description of Unknown: RightRegion for integrase B7876 sequence
tcttttgtgcagtccattactgttcacgagaacggagaaatggatattgtttttttataatcttgtttctactaactacgcactgcccgtcggctcatctgccagaaacagcgacggtctggtcacgatcgcccttgcgatcgccaccctctgctgctgtcctccggacagttcggtcggtctgtgcgtccgtcttttcccaagtgccacgcgatccagtgcctcttttacccgccttttgcgttctggtgccggaacgc

SEQ ID NO: 33876 - DNA, 260 bp, Unknown; identical to SEQ ID NO: 33862
  Description of Unknown: RightRegion for integrase B7877 sequence

SEQ ID NO: 33877 - DNA, 260 bp, Unknown
  Description of Unknown: RightRegion for integrase B7878 sequence
gaaatccgtatatcaaggagtgttgagcggaacaggaaatatcagattatttttttgtagttgttttaccattaacttaatcaaccggtcggttaatatcaattaccggtaaatataattataaagaaagaagggggaaaaatggacagaacagtcgaattgttttttgaaataattgaaacttaccagcggcacgcccaaatggctaaaaatacaaaataccaggagacccgcgagatggcgcaaatgataatcgatgt

SEQ ID NO: 33878 - DNA, 109 bp, Unknown
  Description of Unknown: RightRegion for integrase B7879 sequence
aaaaataataatagtaacacaaatactgttaatataaagaaagtacattttatattttaatgtgggttatgtaactatagccgttgcaccggttcctcccatagttgct

SEQ ID NO: 33879 - DNA, 260 bp, Unknown
  Description of Unknown: RightRegion for integrase B7880 sequence
tccattgtcaaggaaatccgtgttgaccatgacaaaaacattcatattatttttttgtgattgttatactactaactgaacccctccggttggctcatctgccataattatttcaggctgtttaacaagtgctcttgcaattgcaactctctgtttctgaccgcctgataattcattaggttttctatcaccaaagccttccaaatcaacctgtttcaaaatactgttgatttcttcatctgtagccttctttccctgaa

SEQ ID NO: 33880 - DNA, 260 bp, Unknown; identical to SEQ ID NO: 33831
  Description of Unknown: RightRegion for integrase B7881 sequence

SEQ ID NO: 33881 - DNA, 260 bp, Unknown
  Description of Unknown: RightRegion for integrase B7882 sequence
tccattgtcaaggaaatccgtgttgaccatgacaaaaacattcatattatttttttatgattgttatactactaactgaacccctccggtaggttcatcggccaacacaattgcaggtttagcaaccaaggctcttgcaatcgccactctctgctgctgaccacctgaaagattatttggcatacttttcagcttatcttccaatcccagcatagtaacaacttcattcataaacttctgatctacggtatctccatcta

SEQ ID NO: 33882 - DNA, 109 bp, Unknown
  Description of Unknown: RightRegion for integrase B7883 sequence
attatccgggagattcacctgaacactgatcatactgtcgactctgttgatttcttatagcgtcttgtactaactagttgactccgtttggggcggataaagttatgac

SEQ ID NO: 33883 - DNA, 142 bp, Unknown
  Description of Unknown: RightRegion for integrase B7884 sequence
tcgtttgttgaatcggtgctggtgtatgaggatggaagcatggacattcgttttttgtagtctttgtcgtactaactatgcaccgcctgtcggctcatccgccaaaattatcgccggtcttgtcaccaatgccctggctatc

SEQ ID NO: 33884 - DNA, 260 bp, Unknown
  Description of Unknown: RightRegion for integrase B7885 sequence
tcgtttgttgaatcggtgctggtgtatgaggatggaagcatggacattcgttttttgtagtctttgtcgtactaactatgtaccgcctgtcggctcatcggcaagcaccagacttggacttgttataattgcccttgcagaagcaactctctgtttctgtccacctgacatctggtagggatatttatttaatatctctgttatatcaagctgttctgctacattttttactgccctgtcaattacctcaggagaatcat

SEQ ID NO: 33885 - DNA, 260 bp, Unknown
  Description of Unknown: RightRegion for integrase B7886 sequence
attatccgggagattcacctgaatactgatcataccgttgactctgttgatttcttatagcgtcttgtactaactggttgactccgtttggggtagtttagttagtacaagacaatatttattattttactcgtaacttctgtcctacatagatcacattcggattgctgattccattcaactgcgcaaccttctggtaggacgtgccgtatttagctgcaataccggaaagcgtatctccagactggacagtgtaatac

SEQ ID NO: 33886 - DNA, 260 bp, Unknown
  Description of Unknown: RightRegion for integrase B7887 sequence
atcattcaggaaatccatataaatgaagacagtaccataacctccgtcgattttctgtgatgcgtcttgtactaactatactattccattcggagccgacaaaactatgacggccgtcctctccggaactgccgacatcggctttatgggttcggaagcttctatctacacatataacgagggggcgaatgattatgttgtaaactttgcccagctcacccagcgcgccgggaacttcctggttgccagggaagatatta

SEQ ID NO: 33887 - DNA, 260 bp, Unknown
  Description of Unknown: RightRegion for integrase B7888 sequence
attatccgggagattcacctgaatactgatcataccgttgactctgttgatttcttatagcgtcttgtactaactggttgactccgtttggggcggataaagttatgaccgccgtcctctccggtgaggcagatattggctttatgggaagtgaatcttcgatttatacttaccaggaaggtgcaaatgatgtcatcaaaaacttcgcgcagcttacgcagcgcgccggaaactttctggtcgcacgtgaagaaatgccg

SEQ ID NO: 33888 - DNA, 260 bp, Unknown
  Description of Unknown: RightRegion for integrase B7889 sequence
tccattgtcaaggaaatccgtgttgaccatgacaaaaacattcatattatttttttgtgattgttatactactaactgaacccctccggttggctcatccgctaagatcagagatggatttgtaatcatcgctcgggcacttgccactctctgcttctgtcctcctgacatttgatatggatatttgttcaatacttctgtgatcatcaacttttctgcgatcgatctgactctgtcttcaatttctcttgcaggaattt

SEQ ID NO: 33889 - DNA, 260 bp, Unknown
  Description of Unknown: RightRegion for integrase B7890 sequence
ataatagattcaatcgaatttataaatgactatagattttatattcatttaaaattctaactggaggtaagcatgacttctattttaaaaaacaaagttaataaaaaatactctataggtaaattagaaaaattgttaaccaaaaaaatttttttatattttgctgataacaattcattggaaatacccccactttataatatttcatattttattgatattgactatattgaatatacagtcaaagactttaaaaaaga

SEQ ID NO: 33890 - DNA, 260 bp, Unknown
  Description of Unknown: RightRegion for integrase B7891 sequence
tccattgtcaaggaaatccgtgttgaccatgacaaaaacattcatattatttttttatgattgttatactactaactgaacccctccggtcggctcatccgctagcactatagatggtctcgtaatcagggctcttcctatagatgtacgctgctgctgtccacctgagagctcatttggcagatgagtacgtctctctgtaagtccaaggcgcaaaagcatgtcatccatctgtgctttttccacctttcttccatcaa

SEQ ID NO: 33891 - DNA, 260 bp, Unknown
  Description of Unknown: RightRegion for integrase B7892 sequence
acaattttgcagatacacctaaacgatgactgtaccgtgaaagaagtagactttttgtgattcgtcttatactaactatataattccatttggggccgacaaaacaatgaccgctgtactctccggagaagcagatatcggattcatgggttcagaagcttctatttatacctataatgaaggtgcaaacgactatgttatcaattttgctcagcttacacaacgtgccggtaattttctcgtggcgcgagaagaaattc

SEQ ID NO: 33892 - DNA, 260 bp, Unknown
  Description of Unknown: RightRegion for integrase B7893 sequence
tccattgtcaaggaaatccgtgttgaccatgacaaaaacattcatattatttttttatgattgttatactactaactgaacccctccggtcggctcatccgcaagtatcagatccggattgttgatcaatgctctggatatcgccactcgctgcttttcacctccggataattcatacggcttcttgttcatcagatgtgtaattccgaactgttctgcatatttctgcgattcttccatacactctttcgcactcttct

SEQ ID NO: 33893 - DNA, 109 bp, Unknown
  Description of Unknown: RightRegion for integrase B7894 sequence
acaatcaaggagatacatctcaacgacgattacactgtaaaagaggttgattttttgtgatttgtcttgtactaattatactattccatttggagccgataaatcaatg

SEQ ID NO: 33894 - DNA, 143 bp, Unknown
  Description of Unknown: RightRegion for integrase B7895 sequence
atcattcaggagattcatgtgaatgaagaccatgccataacctccgtcgattttctgtgatgcgtcttgtactaactgtactgttccattcggagccgacaaaactatgacggccgtcctctccggaactgccgacatcggct

SEQ ID NO: 33895 - DNA, 260 bp, Unknown
  Description of Unknown: RightRegion for integrase B7896 sequence
tctatcattcgtgagatccgcgtggatcacgagagaaatgtccgtattatttttttgtgatttttatactactaacttacaccgtccggtcggttcatctgccagcaaaatagcaggttttgccgctagtgctcttgcgattgccaccctttgctgctgaccccctgacagtgcacttggaagattttccagtttagtccgaatgcccagtgtatctatgatttcatctacataacctttttctaccttttttccatcca

SEQ ID NO: 33896 - DNA, 255 bp, Unknown
  Description of Unknown: RightRegion for integrase B7897 sequence
attatccgggagattcacctgaacactgatcatactgtcgactctgttgatttcttatagcgtcttgtactaactggttgactccgtttggggcggataaagttatgaccgccgtcctctccggtgaggcagatattggctttatgggaagtgaatcttcgatttatacttaccaggagggtgcaaatgatgtcatcaaaaacttcgcgcagcttacgcagcgcgccggaaactttctggtcgcacgtgaagaaa

SEQ ID NO: 33897 - DNA, 109 bp, Unknown
  Description of Unknown: RightRegion for integrase B7898 sequence
attatccgggagattcacctgaacactgatcatactgtcgactctgttgatttcttatagcgtcttgtactaactggttgactccgtttggggcggataaagttatgac

SEQ ID NO: 33898 - DNA, 260 bp, Unknown
  Description of Unknown: RightRegion for integrase B7899 sequence
tccattgtcaaggaaatccgtgttgaccatgacaaaaacattcatattatttttttgtgattgttatactactaactgaacccctccggtcggtaggttcaatttagtagtatgaaaatctctgttattttttacgtattttacgtatatttttattgacattacgtaaaatacgtgttattatatacttgtaaggaggaaacaatacaaatgagatttcgagaaattgaaaaaatagtcctcaatgacggatgggagtt

SEQ ID NO: 33899 - DNA, 90 bp, Unknown
  Description of Unknown: RightRegion for integrase B7900 sequence
tcgtttgttgaatcagtgctggtgtatgaggatggaagcatggacattcgttttttgtagtctttgtcgtactaactatgcaccgcctgt

SEQ ID NO: 33900 - DNA, 138 bp, Unknown
  Description of Unknown: RightRegion for integrase B7901 sequence
tccattgtcaaggaaatccgtgttgaccatgacaaaaacattcatattatttttttgtgattgttatactactaactgaacccctccggtcggctcatccgctagcactatagacggtctcgtaatcagggctcttcc

SEQ ID NO: 33901 - DNA, 109 bp, Unknown
  Description of Unknown: RightRegion for integrase B7902 sequence
attatccgggagattcacctgaacactgatcataccgttgactctgttgatttcttatagcgtcttgtactaactggttgactccgtttggggcggataaagttatgac

SEQ ID NO: 33902 - DNA, 260 bp, Unknown
  Description of Unknown: RightRegion for integrase B7903 sequence
tcgtttgttgaatcggtgctggtgtatgaggatggaagcatggacattcgttttttgtagtctttgtcgtactaactatgcaccgcctgtcggctcatccgcaagcagtatgtccggcttatttgccagtgccaccgctatcgctgcgcgctgctgctctcctcccgatagctgagccggaagcttatccttatgctcctgtaatcccactgcatttaacagtttaagggcatagcttttgttattgtccctgcatctat

SEQ ID NO: 33903 - DNA, 260 bp, Unknown
  Description of Unknown: RightRegion for integrase B7904 sequence
tctttcgttgaatctattatagtctatgaagacggcagcatggacattaattttttatgattttttatttatactaactatacttaaccgtttggccatcctgcataaaatgcgacatgtgtgattactgcggcaatctctttttgtgttacaccatgattttttgcattttgaagatgatattttaaagaagaatctgtaattccggaagccatcagagcaaccactgtgatgatacttcttgtttttacgtcaatatc

SEQ ID NO: 33904 - DNA, 260 bp, Unknown
  Description of Unknown: RightRegion for integrase B7905 sequence
tcatttgttgaatcggtgctggtgtatgaggacggaagcatgtacattcgttttttatagtctttgtcgtactaactctgcaccgcctgtcggttcatcggctaagatcagctgcggctgtgtaatcagcgctcttgcgactgccgcacgctgcttttgtccgccggatacttcatacggatacttttccagcaaatgcgtgatttcaagcttctttgcaatcggttctaatttctgcatcatttgcgggtactgttctc

SEQ ID NO: 33905 - DNA, 260 bp, Unknown
  Description of Unknown: RightRegion for integrase B7906 sequence
tcaatcatccgtgaaatccgtgttgaccatgagaaaaatattcaaattatttttttgtgattgtttatactactatcttacaccctccggtaggttcatcggcaagcacaatcgcaggctttgcaactaaagcccttgcaatcgcaactctctgctgctgtcctcctgagaggttattcggcatattctttagtttatcttccagagccagcatatgaaccacctcgtccataaatccctgatctaccgtatctccatcc

SEQ ID NO: 33906 - DNA, 260 bp, Unknown; identical to SEQ ID NO: 33831
  Description of Unknown: RightRegion for integrase B7907 sequence

SEQ ID NO: 33907 - DNA, 260 bp, Unknown
  Description of Unknown: RightRegion for integrase B7908 sequence
ctgattgaccgaatacttgtcgatacggggggtgtatgtatcgattgggcgtttatgtagaggggattttcacacgctctataaaaattatacgaaattcgctctttacctgtaaaaaggttttttacaggtaaatgatggtgtattttccgcttatataacaataaaaaagacgcagggaatatccttgcgtcttttgcaattaaaggcccagttctctggcttttcgcgctacatattcagccagggcttggttggca

SEQ ID NO: 33908 - DNA, 260 bp, Unknown
  Description of Unknown: RightRegion for integrase B7909 sequence
atcattcaggagattcatgtgaatgaagaccatgccataacctccgtcgattttctgtgatgcgtcttgtactaactatactgttccattcggagccgacaaaactatgacggccgtcctctccggaactgccgacatcggctttatgggttcggaagcttctatctacacatataacgagggggcgaatgattatgttgtaaactttgcccagctcacccagcgcgccgggaacttcctggttgccagggaagatatta

SEQ ID NO: 33909 - DNA, 109 bp, Unknown
  Description of Unknown: RightRegion for integrase B7910 sequence
attatccgggagattcagctgaatactgatcatactgtcgactctgttgatttcttatagtgtcttgtactaactggttgactccgtttggggcggataaagttatgac

SEQ ID NO: 33910 - DNA, 260 bp, Unknown
  Description of Unknown: RightRegion for integrase B7911 sequence
attatccgggagattcacctgaacactgatcatactgtcgactctgttgatttcttatagcgtcttgtactaactggttgactccgtttggggtagattagttagtacaagacgttatttattatttcacccgtaatctctgtcctgtgtaaattaaattcgggttgaatagcttctcaactatccgtttatctaaactgaatagcttcaattcttaatgcctgaccaactgtaccaagtgtagaaacaccatcagcttt

SEQ ID NO: 33911 - DNA, 260 bp, Unknown
  Description of Unknown: RightRegion for integrase B7912 sequence
tcgtttgttgaatcggtgctggtgtatgaggatggaagcatggacattcgttttttgtagcctttgttgtactaactatgcaccgcctgtcggctcatctgcaaggatcagcttgggctgcgtgatcagcgctcttgccactgccgccctttgtttctgaccgccggatacttcatatggaaacttcttcaaaagttgagtgattccaagctgctgtgcaattggtttgagtttctgactcatctccggatactttttgc

SEQ ID NO: 33912 - DNA, 260 bp, Unknown
  Description of Unknown: RightRegion for integrase B7913 sequence
attatccgagagattcacctgaatcctgatcatactgttgactctgttgatttcttatagcgtcttgtactaactggttaactccatttggggcggataaagttatgaccgccgtcctctccggtgaggcagatattggctttatgggaagtgaatcttcgatttatacttaccaggagggtgcaaatgatgtcatcaaaaacttcgcacagcttacgcaacgcgccggaaactttctggtcgcacgtgaagaaatgccg

SEQ ID NO: 33913 - DNA, 109 bp, Unknown
  Description of Unknown: RightRegion for integrase B7914 sequence
attatccgggagattcagctgaatactgatcataccatcgactctgttgatttcttatagcgtcttgtactaactggttgactccgtttggggcggataaagttatgac

SEQ ID NO: 33914 - DNA, 260 bp, Unknown
  Description of Unknown: RightRegion for integrase B7915 sequence
tctttcgtccagtccataacccttcacgaagacggtaaaatggacattgtttttttatgatgtccgttttactaagtccgcattgcccgtcggctcgtcggccagcacaatagccggtttggtaatcagagcgcgtgcgatagccacacgctgctgctgtccgccggaaagattgttcggcatgtttttcagtttatcttccagccccagtagatgaacgatctcgtccaaaaacttctgatccaccgtgtccccgtcca

SEQ ID NO: 33915 - DNA, 260 bp, Unknown
  Description of Unknown: RightRegion for integrase B7916 sequence
tcaatcatccgtgaaatccgtgttgaccatgagaaaaatattcagattatttttttgtgattgtttatactactatcttacaccctccggttggctcgtccgccagaacgatagcaggctttgataccagagcgcgggcgatggctacacgctgctgctgaccgccggagagattgctgggcatattgttcagcttatcctccagccccagcatccgcaccacttctttcataaaccttttgtctaccttatttccgtcc

SEQ ID NO: 33916 - DNA, 260 bp, Unknown
  Description of Unknown: RightRegion for integrase B7917 sequence
tcgtttgttgaatcggtgctggtgtatgaggacggaagcatggacattcattttttataatttttgtcgtactaactctgcattgcctgtcggctcatcagccaaaattaattcaggatttgttattatcgcgcgtgccactgctgccctttgtttctgtccgcctgacacctcatatggatatttattaagcagcttttcaattccaagcagtgaagctataggtgcaagccttttttccatatccctatagtccacac

SEQ ID NO: 33917 - DNA, 260 bp, Unknown
  Description of Unknown: RightRegion for integrase B7918 sequence
gaaatccgtgtatcaaagagcattgggcggaaccggaaatatcaaatcatctttttgtaattgttttaccgttaagttaagtttccggtatgctgattcatccctgtcatttcattaaatacggtactctttcccacattcgggttgccggccagggcgatcaccttatcgtcttcctggcgcttcctgatttccagcccgcagtctacggacttgattccgacagaatctctgcttaaccccatattacgtcctccgtt

SEQ ID NO: 33918 - DNA, 260 bp, Unknown
  Description of Unknown: RightRegion for integrase B7919 sequence
tcgtttgttgaatcggtgctggtgtatgaggatggaagcatggacattcgttttttgtagtctttgtcgtactaactatgcaccgcctgtcggtactgctttgttagtacaatcaatatattgtggttatccacacagttatcctctatatgtggacaaaataaaagcaaggcggcgcattgtccgtcttgcttctcttttactccaaaattatcgacattattcttcgatgtattcaaccagcttcggatcgccgctga

SEQ ID NO: 33919 - DNA, 260 bp, Unknown
  Description of Unknown: RightRegion for integrase B7920 sequence
attatccgggagattcacctgaatactgatcataccgttgactctgttgatttcttatagcgtcttgtactaactggttgactccgtttggagtagtttagttagtacaagacaatatttattattttactcgtaacttctgtcctacatagatcacattcggattgctgattccattcaactgcgcaaccttctggtaagacgtgccgtatttagctgcaataccggaaagcgtatctccagactggacagtgtaatac

SEQ ID NO: 33920 - DNA, 260 bp, Unknown
  Description of Unknown: RightRegion for integrase B7921 sequence
tcgtttgttgaatcggtgctggtgtatgaggacggaagcatggacattcattttttataatttttgtcgtactaactctgcattgcctgtcggttcatctgccagaatgatagcgggtgctgctgccaaagcacgggcgattgccacacgctgctgctgaccgcctgagagctgatttggcagcgcatccaagcggtcgctcagtccaagtgtctgcacgatctgctgcacaaaattcttgtttatctttccaccatcca

SEQ ID NO: 33921 - DNA, 260 bp, Unknown
  Description of Unknown: RightRegion for integrase B7922 sequence
tccattgtcaaggaaatccgtgttgaccatgacaaaaacattcatattatttttttgtgattgttatactactaactgaacccctccggttggctcatcggccagcacaatagccggtttggtaatcagagcgcgggcaatcgccacacgctgctgctgtccgccggatagattgttcggcatatttttcagtttatcttccagccccagtaggtgaacaatttcgtccaaaaacttctgatccaccgtgtccccgtcca

SEQ ID NO: 33922 - DNA, 260 bp, Unknown
  Description of Unknown: RightRegion for integrase B7923 sequence
tccattgtcaaggaaatccgtgttgaccatgacaaaaacattcatattatttttttgtgattgttatactactaaccgaacccctccggtcggctcatcagcaagtatcagatcaggattattgattaacgcacgacatatggcaactctctgtttttcaccaccggataattcataaggttttttctttaacagatgttctatctgaaattgttctgcatatttctttgcttctgcaatcatcttattaatattctgtt

SEQ ID NO: 33923 - DNA, 260 bp, Unknown
  Description of Unknown: RightRegion for integrase B7924 sequence
tctttcgttgaatctatcactgtctatgaggacggcagtatggacattaattttttatgattttttatttatactaactatacctaaccgtttggcaaggataatactaaaccacaaaaatagccgccctggtctggtaaactaagcggcaatttttgtcaaaacatatatcggactaaccgtctatcgatagcactctttttctataatcatattagcacgcatgtgcagaaacgtcaaaaaatttttattctactttt

SEQ ID NO: 33924 - DNA, 178 bp, Unknown
  Description of Unknown: RightRegion for integrase B7925 sequence
attatccgggagattcacctgaatgctgatcataccgtcgactctgttgattttctatagcgtcttgtactaactggttgactccgtttggggcggataaagttatgaccgccgtcctctccggtgaggcagatattggctttatgggaagtgaatcttcgatttatacttaccagga

SEQ ID NO: 33925 - DNA, 260 bp, Unknown
  Description of Unknown: RightRegion for integrase B7926 sequence
attatccgggagattcacctgaatactgatcataccgttgactctgttgatttcttatagcgtcttgtactaactggttgactccgtttggggcggataaagttatgaccgccgtcctctccggtgaggcagatattggctttatgggaagtgaatcttcgatttatacttaccaggagggtgcaaatgatgtcatcaaaaacttcgcacagcttacgcagcgcgccggaaactttctggtcgcacgtgaagaaatgccg

SEQ ID NO: 33926 - DNA, 109 bp, Unknown
  Description of Unknown: RightRegion for integrase B7927 sequence
acgatcaagcagatccacctgaatgaagactctacgatcaagtttgttgattttttgtagtgcgtctctgcccgggaggcgcgctccaaagccagtaatcagcgtcagg

SEQ ID NO: 33927 - DNA, 115 bp, Unknown
  Description of Unknown: RightRegion for integrase B7928 sequence
tcgtttgttgaatcggtgctggtgtatgaggacggaagcatggacattcgttttttgtagtctttgtcgtactaactatgcaccgcctgttggctcatcagccaaaattaattcg

SEQ ID NO: 33928 - DNA, 260 bp, Unknown
  Description of Unknown: RightRegion for integrase B7929 sequence
attatccgggagattcacctgaatactgatcataccgttgactctgttgatttcttatagcgtcttgtactaactggttgactccgtttggggcggataaagttatgaccgccgtcctctccggtgaggcagatattggctttatgggaagtgaatcttcgatttatacttatcaggagggtgcaaatgatgtcatcaaaaacttcgcgcagcttacgcagcgcgccggaaactttctggtcgcacgtgaagaaatgccg

SEQ ID NO: 33929 - DNA, 260 bp, Unknown
  Description of Unknown: RightRegion for integrase B7930 sequence
tccattgtcaaggaaatccgtgttgaccatgacaaaaacattcatattatttttttgtgattgttatactactaactgaacccctccggtcggttcatcagccaggacgattgcaggctttgacaccaaagcgcgggcaatggctacgcgctgctgctggccgccggaaaggttattgggcatattgttcagcttatcctccagccccagcatctgaacgacttctttcataaacttcttgtctaccttgtttccgtcca

SEQ ID NO: 33930 - DNA, 109 bp, Unknown; identical to SEQ ID NO: 33839
  Description of Unknown: RightRegion for integrase B7931 sequence

SEQ ID NO: 33931 - DNA, 260 bp, Unknown
  Description of Unknown: RightRegion for integrase B7932 sequence
tcgtttgttgaatcggtgctggtgtatgaggacggaagcatggacattcattttttataatttttgtcgtactaactctgcattgcctgtcggctcatcggcaagcaccagacttggacttgttataattgcccttgcagaagcaactctctgtttctgtccacctgacatctggtaaggatatttatttaatatctctgttatatcaagctgttctgctacattttttactgccctgtcaattatctcaggagaatcat

SEQ ID NO: 33932 - DNA, 260 bp, Unknown
  Description of Unknown: RightRegion for integrase B7933 sequence
tccattgtcaaggaaatccgtgttgaccatgacaaaaacattcatattatttttttatgattgttatactactaactgaacccctccggtaggctcatctgccagtacaactgcaggttttgtcattaatgccctggcgatcgccactctctgctgctgtcctccggaaagcgttccgggcagccgctccagttgattctgaattcccaacagcatcacgatttcctcaaagagttcctgattgatccctgttccatcca

SEQ ID NO: 33933 - DNA, 260 bp, Unknown
  Description of Unknown: RightRegion for integrase B7934 sequence
attatccgggagattcacctgaacactgatcatactgtcgactctgttgatttcttatagcgtcttgtactaacttgttgactccgtttggggcggataaagttatgaccgccgtcctctccggtgaggcagatattggctttatgggaagtgaatcttcgatttatacttaccaggagggtgcaaatgatgtcatcaaaaacttcgcgcagcttacgcagcgcgccggaaactttctggtcgcacgtgaagaaatgccg

SEQ ID NO: 33934 - DNA, 260 bp, Unknown
  Description of Unknown: RightRegion for integrase B7935 sequence
tcgtttgttgaatcagtgctggtgtatgaggatggaagcatggacattcgttttttgtagtctttgtcatactaactatgcaccgcctgtcggtactgctttgttagtacaatcaatatattgtggttatccacacagttatcctctatatgtggacaaaataaaagcaaggcggcgcattgtccgtcttgcttctcttttactccaaaattatcgacattattcttcgatgtattcaaccagcttcggatcgccgctga

SEQ ID NO: 33935 - DNA, 260 bp, Unknown
  Description of Unknown: RightRegion for integrase B7936 sequence
atcattcaggaaatccatataaatgaagacagtaccataacctccgtcgattttctgtgatgcgtcttgtactaactatactgttccattcggagccgacaaaactatgacggccgtcctctccggaactgccgacatcggctttatgggttcggaagcttctatctacacatataacgagggggcgaatgattatgttgtaaactttgcccagctcacccagcgcgccgggaacttcctggttgccagggaagatatta

SEQ ID NO: 33936 - DNA, 260 bp, Unknown
  Description of Unknown: RightRegion for integrase B7937 sequence
tccattgtcaaggaaatccgtgttgaccatgacaaaaacattcatattatttttttgtgattgttatactactaactgaacccctccggtcggttcatctgcaagtataatagctggtttggaaacaagggcgcgggcaatcgctacacgctgctgctggccgccggacagattgttaggcatactgttcagcttcccatcgagagccaacattttcacgacttcatccataaaccgcttgtccacggtatcaccatcca

SEQ ID NO: 33937 - DNA, 260 bp, Unknown
  Description of Unknown: RightRegion for integrase B7938 sequence
tccattgtcaaggaaatccgtgttgaccatgacaaaaacattcatattatttttttgtgattgttatactactaactgaacccctccggtcggctcatctgcaagaataaatgccggctcgtttataagcgcccttcctatggatactctttgctgctgacctccagacatttgtcccggcagatgttttgcccttttctcaagacccagcatattgacaatctcagaaagccgttccttattctcttttcttccatcta

SEQ ID NO: 33938 - DNA, 109 bp, Unknown
  Description of Unknown: RightRegion for integrase B7939 sequence
tttaacaaaaataagactctcaacacagttaaaatcaatgagatacagtttaaattttgatgaatggtgtgttacgcggtagaccgcacacgttcccccaatataactt

SEQ ID NO: 33939 - DNA, 260 bp, Unknown; identical to SEQ ID NO: 33831
  Description of Unknown: RightRegion for integrase B7940 sequence

SEQ ID NO: 33940 - DNA, 260 bp, Unknown
  Description of Unknown: RightRegion for integrase B7941 sequence
tccattgtcaaggaaatccgtgttgaccatggcaaaaacattcatattatttttttgtgattgttatactactaactgaacccctccggtcggctcatctgccagaagaagtgtgggataatttgcaagtgcacgggcacatgcacaccgctgcttttgtccgccggacacctgatacggatacttatccttaacctcctcgattcccagaatgcgaagcagctccctgcaccgtttctgaatctcctttttgccacgcc

SEQ ID NO: 33941 - DNA, 109 bp, Unknown; identical to SEQ ID NO: 33871
  Description of Unknown: RightRegion for integrase B7942 sequence

SEQ ID NO: 33942 - DNA, 143 bp, Unknown
  Description of Unknown: RightRegion for integrase B7943 sequence
tcttttattgaatctatccttgtgcacgaagatggaagcatggatatttcttttttgtagctttgtttttactaactacgcaccgcccgtcggctcatctgcaaatataatttccggacgattcaccagtgctcttgcaattg

SEQ ID NO: 33943 - DNA, 260 bp, Unknown
  Description of Unknown: RightRegion for integrase B7944 sequence
attatccgggagattcacctgaacactgatcatactgtcgactctgttgatttcttatagcgtcttgtactaactggttgactccgtttggggcggataaagttatgaccgccgtcctctccggtgaggcagatattggctttatgggaagtgaatcttcgatttatacttaccaggaaggtgcaaatgatgtcatcaaaaacttcgcgcagcttacgcagcgcgccggaaactttctggtcgcacgtgaagaaatgccg

SEQ ID NO: 33944 - DNA, 260 bp, Unknown
  Description of Unknown: RightRegion for integrase B7945 sequence
atcattcaggagattcatgtaaatgaagaccatgccataacctccgtcgattttctgtgatatgtcttgtactaactatactgttccatttggcgccgacaagaccatgactgctgtcctttccggaacagccgatatcggatttatgggatcagaagcttccatttatacttataatgaaggggctcgtgattatgtcgtgaattttgcacagctcactcagcgagccggaaacttcctagttgcaagagaggatatta

SEQ ID NO: 33945 - DNA, 260 bp, Unknown
  Description of Unknown: RightRegion for integrase B7946 sequence
tctttcgttaaatccgttactgtctatgaagacggaagtatggacattaattttctatgattttttatttatactaactatacttaaccgtttggttacaaatagttagtataaatatcttttttgtgcaatttgtcttttgtgtggctccgatccggctctgatccatgcacttccgtaggcataatgcacaaaaggcagcgatcttttgaccgctgccctctttttttactcttcgatttccacttctgtgatctgtg

SEQ ID NO: 33946 - DNA, 109 bp, Unknown
  Description of Unknown: RightRegion for integrase B7947 sequence
attatccgggagattcacctgaacactgatcatactgtcgactctgttgatttcttatagcgtcttgtactaacttgttgactccgtttggggcggataaagttatgac

SEQ ID NO: 33947 - DNA, 260 bp, Unknown
  Description of Unknown: RightRegion for integrase B7948 sequence
tcgtttgttgaatcggtgctggtgtatgaggatggaagcatggacattcgttttttgtagtctttgtcgtactaactatgtaccgcctgtgggctcatctgccagaataatctgagggttagtaataagagctctcgcaaccgctgccctctgcttctgtccacctgacacctcatatgggaactttcctaatatagactcaattcccagctcctttgcaattggcttaagcttctcttgcatgctatcatacttctccc

SEQ ID NO: 33948 - DNA, 260 bp, Unknown
  Description of Unknown: RightRegion for integrase B7949 sequence
tctttcgtgcagtccattactgttcacgaggacggagaaatggatattgtttttttataatcttgtttctactaactacgcactacccgtcggttcgtccgccagaatgatcttcggttctgtgatcagtgcccttgcgatcgctgcacgctgtttctgaccgccggacacttcatacggatatttctccagaagcttttcaatggacagtctgcgtgaaagttccatcattttcggtgccatttcactgtaagtttttc

SEQ ID NO: 33949 - DNA, 260 bp, Unknown
  Description of Unknown: RightRegion for integrase B7950 sequence
tccttcgtgcagtcaatcactgttcacgaggacggagaaatggatattgtttttttatgatcttgtttctactaactatgcaccgcctgtcggtactgcgtagttagtaaaaacgattcttttgtgcagttttgcttttctctggctccgatcagggcgagatctggacttcgtaaaaggcaaattgcacaaaaagagggccgaacagggaactgctccctgcccggtcctcttttactttctcatcttatttcttcaga

SEQ ID NO: 33950 - DNA, 260 bp, Unknown; identical to SEQ ID NO: 33868
  Description of Unknown: RightRegion for integrase B7951 sequence

SEQ ID NO: 33951 - DNA, 260 bp, Unknown
  Description of Unknown: RightRegion for integrase B7952 sequence
gaaatccgtgtatcaaagagcattgggcggaaccggaaatatcaaatcatctttttgtaattgttttaccgttaagttaagtttccggtatgctgattcattccagtcatttcattaaataccgtactcttccccacattcgggttacctgccagcgcgatgaccttatcatcttcccggcgttttttgatttcaagtccgcagtccacagacttgatccccacagaatctctgcttaaccccatattacgtcctccgtt

SEQ ID NO: 33952 - DNA, 260 bp, Unknown
  Description of Unknown: RightRegion for integrase B7953 sequence
tcgtttgttgaatcggtgctggtgtatgaggatggaagcatggacattcgttttttgtagtctttgtcgtactaactatgcaccgcctgttggttcgtccgccaaaattaaatcgggattgtagattaatgcgcggcaaatcgcagttctttgtttttctcctcctgataattcatatggttttttatccaataaatccgcaattgcaaacttctcagccatttcttcacattttttcttactctcctgaacatctgcct

SEQ ID NO: 33953 - DNA, 109 bp, Unknown
  Description of Unknown: RightRegion for integrase B7954 sequence
acaatcaaggagatacatctcaacgacgattacactgtaaaagaggttgattttttgtgatttgtcttgtactaattatatcattccatttggagccgataaatcaatg

SEQ ID NO: 33954 - DNA, 260 bp, Unknown
  Description of Unknown: RightRegion for integrase B7955 sequence
tcgtttgttgaatcagtgctggtgtatgaggatggaagcatggacattcgttttttgtagtctttgtcgtactaactatgcaccgcctgtcggctcatccgctaagatgatcgccggatcattgatcattgcgcgcgcgatcgccacacgctgtttctgtccaccggaaagctcgtttggtttatggaaagcacgttcctccatgccaaccatttttaacatttccatggctcgctctttttgatttttttccctctcag

SEQ ID NO: 33955 - DNA, 109 bp, Unknown
  Description of Unknown: RightRegion for integrase B7956 sequence
aaaaataataatagtaacacaaatactgttaatataaagaaagtacattttatattttaatgtgggttatgtaaccatagccgttgcaccggttcctcccatagttgct

SEQ ID NO: 33956 - DNA, 260 bp, Unknown
  Description of Unknown: RightRegion for integrase B7957 sequence
atcattcaggaaatccatataaatgaagacagtaccataacctccgtcgattttctgtgatgcgtcttgtactaactacactgttccattcggagccgacaaaactatgacggccgtcctctccggaactgccgacatcggctttatgggttcggaagcttctatctacacatataacgagggggcgaatgattatgttgtaaactttgcccagctcacccagcgcgccgggaacttcctggttgccagggaagatatta

SEQ ID NO: 33957 - DNA, 109 bp, Unknown
  Description of Unknown: RightRegion for integrase B7958 sequence
atcattcaggagattcacgtgaatgaagacaacgccataacctctgtcgattttctatgatgcgtcttgtactaactatactgttccattcggagccgacaaaactatg

SEQ ID NO: 33958 - DNA, 109 bp, Unknown
  Description of Unknown: RightRegion for integrase B7959 sequence
attatccgggagattcacctgaatgctgatcatactgtcgactctgttgatttcttatagcgtcttgtactaactggttgactccgtttggggcggataaagttatgac

SEQ ID NO: 33959 - DNA, 260 bp, Unknown
  Description of Unknown: RightRegion for integrase B7960 sequence
tcgtttgttgaatcggtgctggtgtatgaggacggaagcatggacattcattttttataatttttgtcgtactaactctgcattgcctgttggctcatcagccaaaattaattcaggatttgttattatcgcgcgtgccactgctgccctttgtttctgtccgcctgacacctcatatggatatttattaagcagcttttcaattccaagcagtgaagctataggtgcaagccttttttccatatccctatagtccacac

SEQ ID NO: 33960 - DNA, 109 bp, Unknown; identical to SEQ ID NO: 33860
  Description of Unknown: RightRegion for integrase B7961 sequence

SEQ ID NO: 33961 - DNA, 109 bp, Unknown; identical to SEQ ID NO: 33897
  Description of Unknown: RightRegion for integrase B7962 sequence

SEQ ID NO: 33962 - DNA, 260 bp, Unknown
  Description of Unknown: RightRegion for integrase B7963 sequence
tcttttattgacaaaattgtaattgatgtgaacggtaatatagatattatttttttgtaatttaattggtactaacacacccgcacccgtaggtaattctaatgcaactgtctttttatccatatttttaatatacaaatttaacatagctgcttgataatctaaaggtcccatgatctttttcaatttattatcttgatacatttcttgtggtgaggaatataaaaattcttctttctttcgtgttttaaatgccataa

SEQ ID NO: 33963 - DNA, 260 bp, Unknown
  Description of Unknown: RightRegion for integrase B7964 sequence
tctttcgttgaatctatcactgtctatgaggacggcagtatggacattaattttttatgattttttatttatactaactatacctaaccgttcggcaaggataataataagacacaaaaataaccgccctgtctgcaaaactaagcggttacttttgtaatcaataaatatgtggactaaccgtctatcggtagcacccctttttataatcatattagcacgcatctgtgaaaatgtcaaaaattttattcgttctcttg

SEQ ID NO: 33964 - DNA, 109 bp, Unknown; identical to SEQ ID NO: 33839
  Description of Unknown: RightRegion for integrase B7965 sequence

SEQ ID NO: 33965 - DNA, 260 bp, Unknown
  Description of Unknown: RightRegion for integrase B7966 sequence
tcgtttgttgaatcggtgctagtgtatgaggatggaagcatggacattcgttttttgtagtctttgtcgtactaactatgcaccgcctgtaggttcatcagcaagaatcagctttggattagtgataatcgctctagcacttgcaactctctgcttctgtccacctgacatctgatacggatatttatttaacacttcataaattccaagttcatttgcaacttttttcacacgtctgtcaatttcaccggcttttacat

SEQ ID NO: 33966 - DNA, 260 bp, Unknown
  Description of Unknown: RightRegion for integrase B7967 sequence
atcaaaaatatcatagttgacggcagcagaatcacagtaaatttacggctcaaaaaataattcaacctaaaaaaagaggcttttttataataaaaacctcttttttttcttgacaaatatatttaacggctctaaaatagaggtgaagctcagaaaaattgaatagtccattggcgcaataatgaagtaacgctatactgtcaggcgcagggacaaaaggattatcccattatattcggacagctgaccaaaaaggacgg

SEQ ID NO: 33967 - DNA, 260 bp, Unknown
  Description of Unknown: RightRegion for integrase B7968 sequence
tctatcattcgtgagatccgcgtggatcatgagagaaatgtccgtattatttttttgtgatttttatactactaacttacaccgtccggttggttcatctgcaagaataattgcaggtttcgttgctaaagctcgaataatcgctacacgctgttgttcgccaccagatagcattgaggggagcatttcctgtttatttgagatatttaatatattgagcagttcttgaatgaactctttatcaatttgtgcaccatcta

SEQ ID NO: 33968 - DNA, 260 bp, Unknown; identical to SEQ ID NO: 33831
  Description of Unknown: RightRegion for integrase B7969 sequence

SEQ ID NO: 33969 - DNA, 260 bp, Unknown
  Description of Unknown: RightRegion for integrase B7970 sequence
gaaatccgtatatcaaagagtgttgggcggaacaggaaataccagattatttttttgtaattgttttaccgttaagttaatcagcctgtgtgctgattcatccctgtcatttcattaaatacggtactctttcccacattcgggttgccggccagggcgatcaccttatcgtcttcctggcgcttcctgatttccagcccgcagtctacggacttgattccgacagaatctctgcttaaccccatattacgtcctccgtt

SEQ ID NO: 33970 - DNA, 260 bp, Unknown
  Description of Unknown: RightRegion for integrase B7971 sequence
aaaaacaataatagtaacacaaatactgttaatataaggaaagtacattttatattttaatgtgtgttatgtaactatagccgtggcgcttgttacataacgcacatataaaaaccacgcccataaagaacgtggtttagaatatagtattagtttgaaatcaggaacaaagattattatacaattaaaaaatagggtagccaaagagactacccttgtataatgacgtggtaatttaattataacagattaattaattg

SEQ ID NO: 33971 - DNA, 260 bp, Unknown
  Description of Unknown: RightRegion for integrase B7972 sequence
tcgtttgttgaatcggtgctggtgtatgaggatggaagcatggacattcattttttatgatcatcttcgtactaactttgcaccgcctgtcggctcatctgcaaatataatttccggacgattcaccagtgctcttgcaattgctactctctgctgctgtcctccggataactgatttggcagattataaatccggttttcaatccccagagttgcaataatatcatttacatacgcttcatccacttttcttccatcca

SEQ ID NO: 33972 - DNA, 260 bp, Unknown
  Description of Unknown: RightRegion for integrase B7973 sequence
attatagattcgatagaattcataaatgactatagattctatattcatttaaaattctagctggaggttgcaatgtctatcttaaaagaaaaagtaataaataaatattctttaaatcagttaaaagaaatactgccacaaaaaatactctattactttatgaataataaaactttagcaattccacctctttacacaatttcacagtacatagatttagattatattaattataccccttcagatttaaaaaaagatta

SEQ ID NO: 33973 - DNA, 260 bp, Unknown
  Description of Unknown: RightRegion for integrase B7974 sequence
tccattgtcaaggaaatccgtgttgaccatgacaaaaacattcatattatttttttgtgattgttatactactaactgaacccctccggtaggttcatctgccaaaacaacagaacattttttcatcataagacgagctaaagcaactctctgttgttcaccaccggaaagctgataaacttttttgttaacttcctttgataaccccacacgattaagagcttctttaagtgatactttagttcggcttgattttttaa

SEQ ID NO: 33974 - DNA, 260 bp, Unknown
  Description of Unknown: RightRegion for integrase B7975 sequence
ctaattgatcatattgatatagacggcgaaaacgtcgtaatacactgggtttttgagtaatctcttttttattcttttcgagtgcgaatagtgacacttctcctgaaagacgttactattcgcaataaaaaagacacgttcaaaacgtgccctagttgatcaaatttactttcttcttaaattcccgtacaacttcctcaaccgtcaacccctggagtcgatcctgcgtttgctggataatgccattcacaaccccattc

SEQ ID NO: 33975 - DNA, 109 bp, Unknown
  Description of Unknown: RightRegion for integrase B7976 sequence
atcattcaggagattcatgtgaacgaagaccatgccataacctccgtcgattttctgtgatgtgtcttgtactaactatactgttccattcggagccgacaaaactatg

SEQ ID NO: 33976 - DNA, 260 bp, Unknown
  Description of Unknown: RightRegion for integrase B7977 sequence
attatccgagagattcacctgaatcctgatcatactgttgactctgttgatttcttatagcgtcttgtactaactggttaactccatttggggcggataaagttatgaccgccgtcctctccggtgaggcagatattggctttatgggaagtgaatcttcgatttatacttaccaggagggtgcaaatgatgtcatcaaaaacttcgcgcagcttacgcagcgcgccggaaactttctggtcgcacgtgaagaaatgccg

SEQ ID NO: 33977 - DNA, 140 bp, Unknown
  Description of Unknown: RightRegion for integrase B7978 sequence
tcaatcattcgtgaaatccgtgttgaccatgagaaaaatattcagattatttttttatgattgttatactactaactgcacccctccgacaggggcattagacagccattcctcacaaatgttgctgtctaccattcaaa

SEQ ID NO: 33978 - DNA, 260 bp, Unknown
  Description of Unknown: RightRegion for integrase B7979 sequence
attatccgggagattcacctgaacactgatcatactgtcgactctgttgatttcttatagcgtcttgtactaactgattgactccgtttggggcggataaagttatgaccgccgtcctctccggtgaggcagatattggctttatgggaagtgaatcttcgatttatacttaccaggaaggtgcaaatgatgtcatcaaaaacttcgcgcagcttacgcagcgcgccggaaactttctggtcgcacgtgaagaaatgccg

SEQ ID NO: 33979 - DNA, 260 bp, Unknown
  Description of Unknown: RightRegion for integrase B7980 sequence
attgaatccatccgcataaacggcgaccaaatcgccatccactggcgcattggctcatgacaaaattgtacggtctatgcacatggtatttttaattttgtatcaggagataccaaagcggagaacgaaaacccgccccggaaagcgaaattttttcaaaaaagccttgacaatatcactataaaatggtataatgtaagtacagtcaagggcaaccgaggcgagtaaggcggcaagtgccggaaaggagaagcacatgg

SEQ ID NO: 33980 - DNA, 260 bp, Unknown
  Description of Unknown: RightRegion for integrase B7981 sequence
attatccgggagattcacctgaacactgatcatactgtcgactctgttgatttcttatagcgtcttgtactaactggttgactccgtttgggcggataaagttatgaccgccgtcctctccggtgaggcagatattggctttatgggaagtgaatcttcgatttatacttaccaggagggtgcaaatgatgtcatcaaaaacttcgcgcagcttacgcagcgcgccggaaactttctggtcgcacgtgaagaaatgccgg

SEQ ID NO: 33981 - DNA, 260 bp, Unknown
  Description of Unknown: RightRegion for integrase B7982 sequence
attatccgggagattcacctgaacactgatcatactgtcgactctgttgatttcttatagcgtcttgtactaactggttgactccgtttggggcggataaagttatgaccgccgtcctctccggtgaggcagatattggctttatgggaagtgaatcttcgatttatacttaccaggagggtgcaaatgatgtcatcaaaaacttcgcacagcttacgcaacgcgccggaaactttctggtcgcacgtgaagaaatgccg

SEQ ID NO: 33982 - DNA, 260 bp, Unknown
  Description of Unknown: RightRegion for integrase B7983 sequence
attatccggaagattcacctgaacactgatcatactgtcgactctgttgatttcttatagcgtcttgtactaactggttgactccgtttggggcggataaagttatgaccgccgtcctctccggtgaggcagatattggctttatgggaagtgaatcttcgatttatacttaccaggagggtgcaaatgatgtcatcaaaaacttcgcgcagcttacgcagcgcgccggaaactttctggtcgcacgtgaagaaatgccg

SEQ ID NO: 33983 - DNA, 109 bp, Unknown; identical to SEQ ID NO: 33860
  Description of Unknown: RightRegion for integrase B7984 sequence

SEQ ID NO: 33984 - DNA, 260 bp, Unknown
  Description of Unknown: RightRegion for integrase B7985 sequence
ataatagattcgattgaattcgtaaatgactatagattttatattcatttaaaattctaactggaggtaataatgacttctatcttaaaaaacaaggttaataaaaaatattctataggtaatttagaaaaaatattacctgaaaaagcttttttctattttgcaagcgatgaatctttagaaattccagcactttataatatttcaaattatatcgatttgaattatattaaatacactgttaaagattttaaaaaaga

SEQ ID NO: 33985 - DNA, 260 bp, Unknown
  Description of Unknown: RightRegion for integrase B7986 sequence
tccattgtcaaggaaatccgtgttgaccatgacaaaaacattcatattatttttttgtgattgttatactactaactgaacccctccggtcggctcatccgcaaatataatttccggacgattcaccagtgctcttgcaatcgctactctctgctgctgtcctccggataactgatttggcagattgtaaatcctcttttcaatccccagagttgcaataatatcatttacatacgcttcatccacttttcttccatcca

SEQ ID NO: 33986 - DNA, 260 bp, Unknown
  Description of Unknown: RightRegion for integrase B7987 sequence
tccgtgatccgggagatacgcatagaccatgataaaaatattgagattgttttcctgtaatataaaaagctgccaaaaggcagctttttgattttctgtcaaatcttattttaaagcaatttcctgttcctgataaatatcatcaaacaaattctctgatgactgatcttctacgtgcaaagtgacagggctttcgctgtcctgtaaagtatataggaacgctacgttcaaagtggtccctttctggatctcttttatag

SEQ ID NO: 33987 - DNA, 260 bp, Unknown
  Description of Unknown: RightRegion for integrase B7988 sequence
tcgtttgttgaatcggtgctggtgtatgaggatggaagcatggacattcgttttttgtagtctttgtcgtactaactatgcaccgcctgttggctcatctgccaaaataatatcggggtcggaaatcaaactgcgggcggcagcgacgcgctgtttttgaccacctgacatctgcgccggaaatttggagagcacatccgtgattccaaaaagtcctgcaatgtcattcaacttcttctccgcagcagatatatctacat

SEQ ID NO: 33988 - DNA, 260 bp, Unknown
  Description of Unknown: RightRegion for integrase B7989 sequence
acgatccggcagatctatttaaaatcagattatacgattgactatgttgattttatttaatctgtctgcgcctaaattgtcatccccgtttggagccgataaaacaatgactgccgttatttccggagaagccgatattggatttatgggatctgaagcttccgtttatatgtacagcgaaggagcttccgactatgtcgttaattttgcacagctcacacagcgagccggaaactttctcgttgcacggcaagacaacg

SEQ ID NO: 33989 - DNA, 142 bp, Unknown
  Description of Unknown: RightRegion for integrase B7990 sequence
tcgtttgttgaatcggtgctggtgtatgaggatggaagcatggacattcgttttttgtagtctttgtcgtactaactatgcaccgcctgtcggttcatcagctaaaatcagtttcggttcattgattaaggctctagcacaa

SEQ ID NO: 33990 - DNA, 260 bp, Unknown
  Description of Unknown: RightRegion for integrase B7991 sequence
attatagattcgatagaatttataaacgattatagattctatattcatttaaaattctagctggaggttgtaatgtctatcttaaaagaaaaagtaataaataaatattctttaaatcagttaaaagaaatactgccacaaaaaatactctattactttatgaataataaaactttagcaattccacctctttacacaatttcacagtacatagatttagattatattaattataccccttcagatttaaaaaaagatta

SEQ ID NO: 33991 - DNA, 260 bp, Unknown
  Description of Unknown: RightRegion for integrase B7992 sequence
attatccgggagattcacctgaatactgatcataccgttgactctgttgatttcttatagcgtcttgtactaactggttgactccgtttggggcggataaagttatgaccgccgtcctctctggcgaggcagatattggctttatgggaagtgaatcttcgatttatacttaccaggagggtgcaaatgatgtcatcaaaaacttcgcgcagcttacgcctgtctcttatacacatctgacgctgccgacgaattagacg

SEQ ID NO: 33992 - DNA, 260 bp, Unknown
  Description of Unknown: RightRegion for integrase B7993 sequence
gaaaaaagaggtaaagtgcatagaagtaatatttctatcactaatattattttcaaataataataacacactctattacttttacttgtataaaggaatttcccgacgtatgtgggtatatatggatatcactggctcttttttctattgcttcgttaataatttggttcattaattcttttacatcaatagttatcacccctttttctcaagaaaagaaaaatataggctaagtattaccacttagcctatatttaaaa

SEQ ID NO: 33993 - DNA, 160 bp, Unknown
  Description of Unknown: RightRegion for integrase B7994 sequence
tcttttattgaatctatccttgtgcacgaagatggaagcatggatatttcttttttgtagctttgtttttactaactacgcaccgcccgtcggctcatcacagagcagaatatccggattttttacaattgcacgcccaatcgcggttctctgctgctgt

SEQ ID NO: 33994 - DNA, 109 bp, Unknown; identical to SEQ ID NO: 33860
  Description of Unknown: RightRegion for integrase B7995 sequence

SEQ ID NO: 33995 - DNA, 260 bp, Unknown
  Description of Unknown: RightRegion for integrase B7996 sequence
tccattgtcaaggaaatccgtgttgaccatgacaaaaacattcatattatttttttgtgattgttatactactaactgaacccctccggtcggctcatctgcaaatataatttccggacgattcaccagtgctcttgcaattgctactctctgctgctgtcctccggataactgatttggcagattataaatccggttttcaatccccagagttgcaataatatcatttacatacgcttcatccacttttcttccatcca

SEQ ID NO: 33996 - DNA, 260 bp, Unknown
  Description of Unknown: RightRegion for integrase B7997 sequence
tctttcgttgaatctatcactgtctatgaggacggcagtatggacattaattttttatgattttttatttatactaactatacctaaccgtttggttacaaatagttagtataaatattattttgtgcaatttgcctttgatgtggctccgatccagctctgatccatgcacttccgaaggcataatgcacaaaaggcagcgatcttttgaccgctgccctctttttttactcttcgatttccacttctgtgatctgtgc

SEQ ID NO: 33997 - DNA, 260 bp, Unknown; identical to SEQ ID NO: 33832
  Description of Unknown: RightRegion for integrase B7998 sequence

SEQ ID NO: 33998 - DNA, 260 bp, Unknown
  Description of Unknown: RightRegion for integrase B7999 sequence
tccattgtcaaggaaatccgtgttgaccatgacaaaaacattcatattatttttttatgattgttatactactaactgaacccctccggtcggaagctcacgcaccttcttatctatccacttctgaagctcctcgtccttgatatactccttctcaacggacatggatggtgcgtacgatttcacattcgctgttccgctggactggtgaatataatgcttagtctcgttctcagggttaaactcctccgtgagtgagc

SEQ ID NO: 33999 - DNA, 260 bp, Unknown
  Description of Unknown: RightRegion for integrase B8000 sequence
tccattgtcaaggaaatccgtgttgaccatgacaaaaacattcatattatttttttgtgattgttatactactaactgaacccctccggttggttcatccgcaaggatcagagatggatttgagatcattgctctcgcacttgccactctctgcttctgccctccagacatctgatatggatatttgtttaacacctctgtgatcattaatttctctgcgatcgatcttactctgtcctcaatctcttttgccggaactt

SEQ ID NO: 34000 - DNA, 109 bp, Unknown
  Description of Unknown: RightRegion for integrase B8001 sequence
attatccgggagattcacctgaatactgatcataccgttgactctgttgatttcttatagcgtcttgtactaactagttgactccgtttggggcggataaagttatgac

SEQ ID NO: 34001 - DNA, 166 bp, Unknown
  Description of Unknown: RightRegion for integrase B8002 sequence
tctttcgttgaatctattatagtctatgaagacggcagcatggacattaattttttatgattttttatttatactaactatacttaaccatttggccatcctgcataaaatgcgacatgtgtgatcactgcggcaatctctttttgtgttacaccatgattttttg

SEQ ID NO: 34002 - DNA, 109 bp, Unknown; identical to SEQ ID NO: 33897
  Description of Unknown: RightRegion for integrase B8003 sequence

SEQ ID NO: 34003 - DNA, 109 bp, Unknown
  Description of Unknown: RightRegion for integrase B8004 sequence
atcattcaggaaatccatataaatgaagacagtaccataacctccgtcgattttctgtgatgcgtcttgtactaactatactgttccatttggagccgacaaaactatg

SEQ ID NO: 34004 - DNA, 109 bp, Unknown; identical to SEQ ID NO: 33860
  Description of Unknown: RightRegion for integrase B8005 sequence

SEQ ID NO: 34005 - DNA, 201 bp, Unknown
  Description of Unknown: RightRegion for integrase B8006 sequence
attatccgggagattcacctgaacactgatcatactgtcgactctgttgatttcttatagcgtcttgtactaactggttgactccgtttggggcggataaagttatgaccgccgtcctctccggtgaggcagatattggctttatgggaagtgaatcttcgatttatacttaccaggaaggtgcaaatgatgtcatcaaaa

SEQ ID NO: 34006 - DNA, 260 bp, Unknown
  Description of Unknown: RightRegion for integrase B8007 sequence
tctatcatccgggagatccgcgtggatcataataggaatgtccgtattatttttttgtgatttttatactactaacttacaccgtcctgtcggctcatctgcaagaataaatgccggctcgtttataagtgcccttcctatggatactctttgctgctgacctcctgacatttgacctggcagatgttttgcccttttctcaagacccagcatattcacaatctcagaaagccgttccttattctcttttcttccatcta

SEQ ID NO: 34007 - DNA, 109 bp, Unknown
  Description of Unknown: RightRegion for integrase B8008 sequence
atcattcaggagattcatgtgaatgaagaccatgccataatctccgtcgattttctgtgatgcgtcttttactaactatactgttccatttggcgccgacaagaccatg

SEQ ID NO: 34008 - DNA, 260 bp, Unknown; identical to SEQ ID NO: 33864
  Description of Unknown: RightRegion for integrase B8009 sequence

SEQ ID NO: 34009 - DNA, 154 bp, Unknown
  Description of Unknown: RightRegion for integrase B8010 sequence
tccattgtcaaggaaatccgtgttgaccatgacaaaaacattcatattatttttttatgattgttgtactactaacttaccccctccggtcggctcatccgcaaatataatttccggacgattcaccagtgctcttgcaattgctactctctgc

SEQ ID NO: 34010 - DNA, 260 bp, Unknown
  Description of Unknown: RightRegion for integrase B8011 sequence
attatccgggagattcacctgaatactgatcataccgttgactctgttgatttcttatagcgtcttgtactaactggttgactccgtttggggcggataaagttatgaccgccgtcctctccgatgaggcagatattggctttatgggaagttaatcttcgatttatacttaccaggagggtgcaaatgatgtcatcaaaaatttcgcgcagcttacgcagcgcgccggaaactttctggtcgcacgtgaagaaatgccg

SEQ ID NO: 34011 - DNA, 109 bp, Unknown
  Description of Unknown: RightRegion for integrase B8012 sequence
attatccgggagattcacctgaacactgatcatactattgactctgttgatttcttatagcgtcttgtactaactggttgactccgtttggagcggataaagttatgac

SEQ ID NO: 34012 - DNA, 260 bp, Unknown
  Description of Unknown: RightRegion for integrase B8013 sequence
ataatagattcaatcgaatttataaatgactatagattttatattcatttaaaattctaactggaggtaagcatgacttctattttaaaaaacaaagttaataaaaaatactctataggtaaattagaaaaattgttaaccaaaaaaatttttttatattttgctgataacaattcattggaaatacccccactttataatatttcatattctattgatattgactatattgaatacacagtcaaagactttaaaaaaga

SEQ ID NO: 34013 - DNA, 260 bp, Unknown; identical to SEQ ID NO: 33981
  Description of Unknown: RightRegion for integrase B8014 sequence

SEQ ID NO: 34014 - DNA, 260 bp, Unknown
  Description of Unknown: RightRegion for integrase B8015 sequence
tcgtttgttgaatcggtgctggtgtatgagggcggaagcatggacattcgttttttgtagtctttgtcgtactaactatgcaccgcctgtcggctcgtcagccagcacgatagccggtttggtaatcagagcgcgggcaatcgccacacgctgctgctgtccgccggatagattgttcggcatatttttcagtttatcttccagccccagtaggtgaacaatttcgtccaaaaacttctgatccaccgtgtccccgtcca

SEQ ID NO: 34015 - DNA, 260 bp, Unknown
  Description of Unknown: RightRegion for integrase B8016 sequence
aaaaataataatagtaacacaaatactgttaatataaagaaagtacactttatattttaatgtgtgttatgtaactatagccgtggtgcttgttacataacgcacatataaaaaccacgcccattaagaacgtggtagagaaaattataaagaagtaaaaaagattaaattgtatgtaatttaattataacacaaaagtaaccgtaccagttaagatatagttacttattcagacttatgagaggtggcctttaatatgt

SEQ ID NO: 34016 - DNA, 260 bp, Unknown
  Description of Unknown: RightRegion for integrase B8017 sequence
attatccgggagattcacctgaatactgatcataccgttgactctgttgatttcttatagcgtcttgtactaactggttgactccgtttggggtagtttagttagtacaagacaatatttattatttcacccgcagtatctgaccaacatagatcaaattagggttggatagcccattaagctgcgcaaccttctggtaggacgtgccgtatttagctgcaataccggaaagcgtatctccagactggacagtgtaatac

SEQ ID NO: 34017 - DNA, 260 bp, Unknown
  Description of Unknown: RightRegion for integrase B8018 sequence
tcgtttgttgaatcagtgctggtgtatgaggatggaagcatggacattcgttttttgtagtctttgtcgtactaactatgcactgcctgtaggctcatcagcaagaataagctttggattagtaataatggctcttgcacttgccactctctgcttctgtccgcctgacatctgataaggatatttgtttaatacatcttcaatgccaagctctcttgcagtctgtcttactcttaattcaatctcccttgccggaacat

SEQ ID NO: 34018 - DNA, 260 bp, Unknown
  Description of Unknown: RightRegion for integrase B8019 sequence
atccacccggacggaggagcggaattcctgttcaggaacggagcggtaataacggaataactgtaaaaaagcaaggcccggaaaggaaaaatccgggtcttttcttgcatctttattcacgaagagctgccgttcgcgcgtaaaaaatgcccgttacacgatagcccctgcgtccacacgatagccccattctacacgatagcttttcgggatttcgctccaaaacggcaaaacgagccatttgcaaaccgatttgaggc

SEQ ID NO: 34019 - DNA, 260 bp, Unknown
  Description of Unknown: RightRegion for integrase B8020 sequence
attatccgggagattcacctgaatactgatcataccgttgactctgttgatttcttatagcgtcttgtactaactggttgactccgtttggggtagtttagttagtacaagacaatatttattattttacccgcagtctctgaccaacatagatcaaattagggttggatagcccattaagctgcgcaaccttctggtaggatgtgccatacttggatgcaataccggaaagcgtatcaccgctctgcacggtatagtat

SEQ ID NO: 34020 - DNA, 260 bp, Unknown
  Description of Unknown: RightRegion for integrase B8021 sequence
tcttttgtgcagtccattactgttcacgagaacggagaaatggatattgtttttttataatctcgtttctactaactacgcacttcccgtcggtactgcatagttagtaaaactatattttttgtgcaattttccttttgaggggttccgatccggctctgatccatgcacttccagaggcataatgcacactgcttcgccttcttgattgtctgaaacgctccgatctggctactggcattcttccaggtcttgcgaac

SEQ ID NO: 34021 - DNA, 260 bp, Unknown
  Description of Unknown: RightRegion for integrase B8022 sequence
tctttcattcaatccgtagttgtgtatgacagctatcgtttagacattactttcttataatgctacaaatgctaacaacgcaaaaagagccatcctttcggacgactctttcttttgtacgttgttagccttatcgggcatggctttgttttcttcttttgtatggttatacaataacatatcatgtcgagaattgcaatcaaaatcgttagacaaatttcgacatcattcgcacttaacaaaaaatgctaccggcattc

SEQ ID NO: 34022 - DNA, 260 bp, Unknown
  Description of Unknown: RightRegion for integrase B8023 sequence
tcgtttgttgaatcggtgctggtgtatgaggatggaagcatggacattcgttttttgtagtctttgtcgtactaactatgcaccgcctgtcggttcatcggctaagatcagctgcggctgtgtaatcagcgctcttgcgactgcggcacgctgtttttgcccgccggatacttcatacggatacttttccagcaaatgcgtgatttcaagcttctttgcaatcggttctaatttctgcatcatttgcgggtactgttctc

SEQ ID NO: 34023 - DNA, 260 bp, Unknown
  Description of Unknown: RightRegion for integrase B8024 sequence
atcattcaggagattcatgtgaacgaagaccatgccataacctccgtcgattttctgtgatgtgtcttgtactaactacactgttccattcggagccgacaaaactatgacggccgtcctctccggaactgccgacatcggctttatgggttcggaagcttctatctacacatataacgagggggcgaatgattatgttgtaaactttgcccagctcacccagcgcgccgggaacttcctggttgccagggaagatatta

SEQ ID NO: 34024 - DNA, 260 bp, Unknown
  Description of Unknown: RightRegion for integrase B8025 sequence
tccattgtcaaggaaatccgtgttgaccatggcaaaaacattcatattatttttttatgattgttatactactaactgaacccctccggtcggctcgtcggccagcacgatagccggtttggtaatcagggcgcgtgcaatcgccacacgctgctgctgtccgccggaaagattattcggcatatttttcagtttatcttccagccccagcaggtgaacgatctcgtccaaaaacttctgatccaccgtgtccccgtcca

SEQ ID NO: 34025 - DNA, 260 bp, Unknown; identical to SEQ ID NO: 33864
  Description of Unknown: RightRegion for integrase B8026 sequence

SEQ ID NO: 34026 - DNA, 164 bp, Unknown
  Description of Unknown: RightRegion for integrase B8027 sequence
tcgtttgttgaatcggtgctggtgtatgaggatggaagcatggacgttcgttttttgtagtctttgtcgtactaactatgcaccgcctgtcggttcatcagcaaggataatcgcaggcttcgtaattaaagctcgtgcaatcgctacacgttgctgttgaccgc

SEQ ID NO: 34027 - DNA, 260 bp, Unknown; identical to SEQ ID NO: 33858
  Description of Unknown: RightRegion for integrase B8028 sequence

SEQ ID NO: 34028 - DNA, 109 bp, Unknown
  Description of Unknown: RightRegion for integrase B8029 sequence
atcattaaggagattcatgtgaatgaagaccatgccataacctccgtcgattttctgtgatacgtcttgtactaactatactgttccatttggcgccgacaagaccatg

SEQ ID NO: 34029 - DNA, 260 bp, Unknown
  Description of Unknown: RightRegion for integrase B8030 sequence
tcttttattgataaaattgtgattcatgaagacggtaaaattgatattatttttttatagctttatgtgtactaactacgcatcccccgtcggctcgtcgcagagcagaatatccggatttttcacgattgccctgccgattgccgtccgctgctgctgaccgccggacaactggctcggaattttgttctgatgttctgtcagtcccagcacatcaagcagttcatcaatatctaacggccggctgcttaaatatgcgc

SEQ ID NO: 34030 - DNA, 260 bp, Unknown
  Description of Unknown: RightRegion for integrase B8031 sequence
tcttttgtcgaatctgtgctggtgcatgaagacggaagcatggacattcattttttataatttttgtcgtactaactctgcattgcctgtcggctcatctgcaaatataatttccggacgattcaccagtgctcttgcaattgctactctctgctgctgtcctccggataactgatttggcagattataaatccggttttcaatccccagagttgcaataatatcatttacatacgcttcatccacttttcttccatcca

SEQ ID NO: 34031 - DNA, 161 bp, Unknown
  Description of Unknown: RightRegion for integrase B8032 sequence
tcttttgttgaatcggtgctggtatacgaagatggaagcatggacattcattttttatgatcatcttcgtactaactttgcaccgcctgtcggctcatctgcaaatataatttccggacgattcaccagtgctcttgcaattgctactctctgctgctgtc

SEQ ID NO: 34032 - DNA, 260 bp, Unknown
  Description of Unknown: RightRegion for integrase B8033 sequence
tcctttgtcgataaaatcatcgtatatgaggacggcagcatggacattctttttttatagtttccttcttactaagtccgcactacccgtaggttcgtctgccaaaataatcgcaggctttgttgccaaagcccgagcaatcgcaactctctgttgctgacctccggaaagattatttggcagattcctcagtttcttctgcaaaccaagagcgtgaataatctctttgtatctgtcctgccaccgtcaatctcaatggg

SEQ ID NO: 34033 - DNA, 109 bp, Unknown
  Description of Unknown: RightRegion for integrase B8034 sequence
atcattcaggagattcatgtggacgaagaccatgccatagcctccgtcgattttctgtgatgcgtcttgtactaactatactgttccatttggtgccgacaagaccatg

SEQ ID NO: 34034 - DNA, 260 bp, Unknown
  Description of Unknown: RightRegion for integrase B8035 sequence
tcttttgtcgaatctgtgctggtgcatgaagacggaagcatggacattcattttttataatttttgtcgtactaactctgcattgcctgttggctcatcagccaaaattaattcgggatttgttattatcgcacgtgccactgctgccctttgcttctgtcctcctgacacctcatatggatatttattaagcagcttttcaattccaagcagcgaagctataggtgcaagccttttttccatatccctatagtccacac

SEQ ID NO: 34035 - DNA, 260 bp, Unknown
  Description of Unknown: RightRegion for integrase B8036 sequence
atcattcaggagattcatgtgaacgaagaccatgccatagcctccgtcgattttctgtgatgcgtcttgtactaactatactgttccatttggagttagccagttagtacaagacgattttgattatcctacataagtcttaccgccataccgtacagcaatccatccagatggaatctgcatccagatatcactgccgatcatcttacatccccagtaagattctccatgtattctgtccaacaatgccatcaattgta

SEQ ID NO: 34036 - DNA, 260 bp, Unknown
  Description of Unknown: RightRegion for integrase B8037 sequence
tctatcatccgggagatccgcgtggatcaggataagaatgtccgtattatttttttgtaactttttatactactaacttgcaccgtcctgtcggttcatcagccaggacgattgcaggctttgacaccaaagcgcgggcaatggctacgcgctgctgctggccgccggaaaggttattgggcatattgttcagcttatcctccagccccagcatctgaacgacttctttcataaacttcttgtctaccttgtttccgtcc

SEQ ID NO: 34037 - DNA, 260 bp, Unknown
  Description of Unknown: RightRegion for integrase B8038 sequence
tctatcattcgtgagatccgcgtggatcatgagagaaatgtccgtattatttttttgtgatttttatactactaacttacaccgtcctgtaggttcatcagccagtacgattgctggatttgttaccattgctcttgcagcggctacccgctgctgttgaccgccggacatctgatagggatatttgttcaatacttcctgaatgttcagcgcctttgcaatctgcgggacacatttttgaatctcgcttggtttggttc

SEQ ID NO: 34038 - DNA, 260 bp, Unknown
  Description of Unknown: RightRegion for integrase B8039 sequence
tcttttgtcgaatctgtgctggtgcatgaagacggaagcatggatattcattttttataatttttgtcgtactaactctgcattgcctgtaggctcatcagccagtattattggagcatctgataccaatgctctggcaatagctactctttgctgctgtccaccagataatttcataacatttctttttatttgttttttatctaagcctagttcaaacaagatactttcatctgctgatttattcactaatctaatat

SEQ ID NO: 34039 - DNA, 153 bp, Unknown
  Description of Unknown: RightRegion for integrase B8040 sequence
ataatcaaggagattcgggtggaggacaaccatgttgtgggcgtaacatttaacgtctaaattttttgcacatattagggactaattacccgttttctgtagtaatagggcagttagtccccaaatcaaacaccccgccggggcttctgaaat

SEQ ID NO: 34040 - DNA, 260 bp, Unknown
  Description of Unknown: RightRegion for integrase B8041 sequence
tcttttgttgaatcggtgctggtatacgaagatggaagcatggacattcattttttatgatcatcttcgtactaactacgcaccgcctgtaggctcatcacacaacaggatatccggattttttataatagctcttccaattgaagttctctgctgctgaccgcctgataactggttaggcttcttatcaacgtgatctgaaagtcctaatgtattaagaatctcatctgtatcaagtgccttgtcacttaagtaagcac

SEQ ID NO: 34041 - DNA, 260 bp, Unknown
  Description of Unknown: RightRegion for integrase B8042 sequence
gttatatcagaaattcgtgttgaccgtgataataacgtcacgggaattatttttgggtagtgttgtactaatgcaacactacctgtgggttcatctgccagaatgatagcgggtgctgccgccagcgcacgggcaatggctacacgctgctgttgaccgcctgagagctgattgggcagggcatccagacggtcgctcagtccaagcgtctgcacgatctgctgcacaaaagccttgtttacctttccgccatccagttc

SEQ ID NO: 34042 - DNA, 260 bp, Unknown
  Description of Unknown: RightRegion for integrase B8043 sequence
atcattcaggagattcatgtgaatgaagaccatgccataacctccgtcgattttctgtgatgcgtcttgtactaactgtactgttccatttggagttagctagttaatacaagacgattttgattatcttacataagtcttcccaccatatcttgcagcaatccagcctgatggaatctgcatccagatatcattgctgatcatcttacattccaagcaaaactctccatgtgttctgtccaacaatgccgtctggtgta

SEQ ID NO: 34043 - DNA, 260 bp, Unknown
  Description of Unknown: RightRegion for integrase B8044 sequence
tcctttattgattatatttatatttacgaggacggcagcatggacattcattttttataatcttatagtttgactaactctggttaaccagttgcctcatctaaatacactttactctgcaaaatgcgattctgggccgcatagcgaagtgcctttatcaattcaagggcaattaaaataacaagtccacctatgtccacaaaaacaattgtctctaactgactgagagcggttgcctttctttgagaatatgcttctgc

SEQ ID NO: 34044 - DNA, 260 bp, Unknown
  Description of Unknown: RightRegion for integrase B8045 sequence
ataactattgatgaagaatctgtaaatataacttggagaattgaaagcaaaattgtatagtctatgttaatgggatttgggtgtaatgcttgtggtgtcactggttgtcgaattatcgaatctccaagggaacgaattatagctaccgtaacaaataattttgttccctgtaacggaagatttccaactttaattgcaataataactatgtttttcgccacagggatttcattaccatttcgttcgcttgtttcggcggg

SEQ ID NO: 34045 - DNA, 260 bp, Unknown
  Description of Unknown: RightRegion for integrase B8046 sequence
gtagagataaccgcaagccgggaaatccggttttatttgtgcatgaaatatactacttaatgtttttacccggatggctactggatcgaagtagtaccatacaggtaaatcaaacgaagttcagcaaaagaccaggggcgcttctacccctggtctttctctgtatcctgtcgatcagtttcaggacagctctctctgcacgacaaatcatatcaacattcatatgtattgtcaatgtaaatcgttcggcatagttcgac

SEQ ID NO: 34046 - DNA, 260 bp, Unknown
  Description of Unknown: RightRegion for integrase B8047 sequence
tcttttgttgaatcggtgctggtatacgaagatggaagcatggacattcattttttatgatcatcttcgtactaactacgcaccgcctgtcggtactgctttgttagtacaatcaatatattgtggttatccacacagttatcctctatatgtggacaaaataaaagcaaggcggcacattgtccgtcttgcttctcttttactccaaaattatcgacattattcttcgatgtattcaaccagcttcggatcgccgctga

SEQ ID NO: 34047 - DNA, 260 bp, Unknown
  Description of Unknown: RightRegion for integrase B8048 sequence
tctatcattcgtgagatccgcgtggatcatgagagaaatgtccgtattatttttttgtgattttttatactactaacttacaccgtcctgtcggttcatctgctaatagaatcgccggtttggctgcgagtgcccgcgcgatcgccacacgctgctgctgtcctcccgaaagctggtttggcagcacgtttaatttttctttcaatccgagcgcctctgcgatctccccgataaatgcattgtccacggtttttccgtca

SEQ ID NO: 34048 - DNA, 260 bp, Unknown; identical to SEQ ID NO: 34029
  Description of Unknown: RightRegion for integrase B8049 sequence

SEQ ID NO: 34049 - DNA, 260 bp, Unknown
  Description of Unknown: RightRegion for integrase B8050 sequence
gttatatcagaaattcgtgttgaccgtgataataacatcacgggaattatttttgggtagtgttgtactaatgcgacactacctgttggctgtgttaagttagtacaaaataaaaaccccagcaaggctactgcctgccggggttttattttacagtccatttcctttgaacattgcccacccgccttttgaaaacgggttgtttttatcttttggaaagtcctttagatattgcttgaataaacttgttcttatatgtt

SEQ ID NO: 34050 - DNA, 260 bp, Unknown; identical to SEQ ID NO: 34035
  Description of Unknown: RightRegion for integrase B8051 sequence

SEQ ID NO: 34051 - DNA, 260 bp, Unknown
  Description of Unknown: RightRegion for integrase B8052 sequence
tctatcattcgtgagatccgcgtggatcatgagagaaatgtccgtattatttttttgtgatttttatactactaacttacaccgtcctgtcggttcatctgccagaacaattgccggacggttgatcagtgcccgcccgatggatacgcgctgctgctgtccgccggagagttcttccggaagatgcgtttttcttccgttaagtcccaactcatcgatcagtttatccagacgctttttatccaccgtctgtccgtcaa

SEQ ID NO: 34052 - DNA, 139 bp, Unknown
  Description of Unknown: RightRegion for integrase B8053 sequence
tcttttgttgaatcagtgctggtatacgaagatggaagcatggacattcattttttatgatcatcttcgtactaactttgcaccgcctgtcggctcatctgcaaatataatttccggacgattcaccagtgctcttgca

SEQ ID NO: 34053 - DNA, 260 bp, Unknown
  Description of Unknown: RightRegion for integrase B8054 sequence
tcttttgtcgaatctgtgctggtgcatgaagacggaagcatggacattcattttttataatttttgtcgtactaactctgcattgcctgtcggctcatccgcaaatataatttccggacgattcaccagtgctcttgcaattgctactctctgctgctgtcctccggataactgatttggcagattataaatccggttttcaatccccagagttgcaataatatcatttacatacgcttcatccacttttcttccatcca

SEQ ID NO: 34054 - DNA, 225 bp, Unknown
  Description of Unknown: RightRegion for integrase B8055 sequence
tcttttgtcgaatctgtgctggtgcatgaagacggaagcatggacattcattttttataatttttgtcgtactaactatgcaccgcctgtgggttcatctgccagaatgatagcgggtgctgccgccagcgcacgggcgattgccacacgctgctgctgaccgccggagagctgattgggcagcgcatccagacgatcatccagcccaagtgtctgtacaatctg

SEQ ID NO: 34055 - DNA, 260 bp, Unknown
  Description of Unknown: RightRegion for integrase B8056 sequence
atcattcaggagattcatgtgaacgaagaccatgccatagcctccgtcgattttctgtgatgcgtcttgtactaactatactgttccatttagagttagctagttagtacaagacaattttgattatcctacatatgtctttccaccatatcgtgcagcaatccatccagatggaatctgcatccagatatcattgctgatcatcttacattccaagtaaaactctccatgtgttctgtccgacaatgccatctggtgtg

SEQ ID NO: 34056 - DNA, 260 bp, Unknown
  Description of Unknown: RightRegion for integrase B8057 sequence
tcttttgtcgaatctgtgctggtgcatgaagacggaagcatggacattcattttttataatttttgtcgtactaactctgcactgcctgtcggctcatctgcaaatataatttccggacgattcaccagtgctcttgcaattgctactctctgctgctgtcctccggataactgatttggcagattataaatccggttttcaatccccagagttgcaataatatcatttacatacgcttcatccacttttcttccatcca

SEQ ID NO: 34057 - DNA, 260 bp, Unknown
  Description of Unknown: RightRegion for integrase B8058 sequence
tctttcgtccagtccataacccttcacgaagacggtaaaatggacattgtttttttatgatgtccgttttactatgtccgcattgcccgtcggctcatctgcaaatataatttccggacgattcaccagtgctcttgcaattgctactctctgctgctgtcctccggataactgatttggcagattataaatccggttttcaatccccagagttgcaataatatcatttacatacgcttcatccacttttcttccatcca

SEQ ID NO: 34058 - DNA, 260 bp, Unknown
  Description of Unknown: RightRegion for integrase B8059 sequence
tcttttattgataaaattgtgattcatgaagacggtaaaattgatattatttttttatagctttatgtgtactaactacgcatcccccgtcggctcgtcgcagagcagaatatccggatttttcacgattgccctgccgattgccgtccgctgctgctgaccgccggacaactggctcggaattttgttctgatgttctgtcagtcccagcacatcaagcagttcatcaatctctaacggccggctgcttaaatatgcgc

SEQ ID NO: 34059 - DNA, 90 bp, Unknown
  Description of Unknown: RightRegion for integrase B8060 sequence
tctatcattcgtgagatccgcgtggatcatgagagaaatgtccgtattatttttttgtgatttttatactactaacttacaccgtcctgt

SEQ ID NO: 34060 - DNA, 260 bp, Unknown
  Description of Unknown: RightRegion for integrase B8061 sequence
tcttttgtcgaatctgtgctggtgcatgaagacggaagcatggacattcattttttataatttttgtcgtactaactatgcaccgcctgtcggttcatccgcaagtataacagcaggatgggtaatcaatgcccttgctattgcaactctctgctgttcaccgcctgacatctgtgatggaaacttattcttacaatgcgatattcccaattcctctaacaaatcatcaacctcattctcatcaggcttcttgccatcta

SEQ ID NO: 34061 - DNA, 139 bp, Unknown
  Description of Unknown: RightRegion for integrase B8062 sequence
tcgtttgttgaatcggtgctggtgtatgaggacggaagcatggacatttgttttttgtagtctttgtcgtactaactatgcaccgcctgtcggctcatctgcaaatataatttccggacgattcaccagtgctcttgca

SEQ ID NO: 34062 - DNA, 260 bp, Unknown
  Description of Unknown: RightRegion for integrase B8063 sequence
tctataatagattatataacccttgataaagactataatatgaaaatattttttatttaattttttggtactttttaactttaccagatgataatgttaaaaagtactatctttattataataattaaagcaatctaccatgcccttttgatatacctttttaaatatatttgaaaattccattacaatatttttttcattttctgttaatccttccactaatttttttaatgttacatcttttccttcatttattttta

SEQ ID NO: 34063 - DNA, 95 bp, Unknown
  Description of Unknown: RightRegion for integrase B8064 sequence
tcgtttgttgaatcggtgctggtgtatgaggacggaagcatggacattcattttttatgatcatcttcgtactaactatgcaccgcctgtcggct

SEQ ID NO: 34064 - DNA, 260 bp, Unknown
  Description of Unknown: RightRegion for integrase B8065 sequence
tcttttgtcgaatctgtgctggtgcatgaagacggaagcatggacattcattttttataatttttgtcgtactaactctgcattgcctgtaggctcatcagcaagaataagcttcggattagtaataatggctcttgcacttgccactctctgcttctgtccgcctgacatctgataaggatatttgtttaatacatcttcaatgccaagctctcttgcagtctgtcttactcttaattcaatctcccttgccggaacat

SEQ ID NO: 34065 - DNA, 227 bp, Unknown
  Description of Unknown: RightRegion for integrase B8066 sequence
atcattgcagaaatccaacttgatgataaccaggtaaaagaaatcatcttcaagtcataatttttttatgccctaaatggtggactaacttatatatctctgtcgacactgctccgccgaagaaaacaatgtggctgctgttttccagcagctccctgagcttctgctgttctgtcatccctgctcctcctttgttgtggactgccggtcggtttactgatggcttt

SEQ ID NO: 34066 - DNA, 260 bp, Unknown
  Description of Unknown: RightRegion for integrase B8067 sequence
atcattgcagaaatccaacttgatgataaccaggtaaaagaaatcatcttcaagtcataattttttatgccctaaatggtggactaacttatatatatctgtcgacactcctgctccgccgaagaaaacaatgtggctgctgttttccagcagctccctgagcttctgctgttctgtcatccctgctcctcctttgttgtggactgccggtcggtttactgatggctttccccggtgaccatgcccagcagctgcatact

SEQ ID NO: 34067 - DNA, 260 bp, Unknown
  Description of Unknown: RightRegion for integrase B8068 sequence
tcgtttgttgaatcggtgctggtgtatgaggacggaagcatggacattcgttttttataatctttgtcgtactaactctgcactgcctgtcggttcgtcagcgagcaaaatggcaggttttgcagctaaagcccttgcaattgccactctctgctgctgtccgccggatagagcacttggcagattttccaattttgtccgaataccaagtgtatcaatgatttcatctacatatttcttttcaatcttttttccatcca

SEQ ID NO: 34068 - DNA, 260 bp, Unknown
  Description of Unknown: RightRegion for integrase B8069 sequence
agcagtaataaacttggctggtgtgagtttccgtataaatcaagggtaataccaacctgagaacccttaaaaacccttaaagtcccttacatggcgagaaatcccatgaaatggggcttttttaggcttaaaaggtaggaaatgcctttaaaaaatacggaatttgtaaatgccaacttgaaaagagaaagaggagtttaaaaggcgtaaatgtcagagatgatattggtaaaaagtatgggttttaaatcgttcaaaaa

SEQ ID NO: 34069 - DNA, 260 bp, Unknown
  Description of Unknown: RightRegion for integrase B8070 sequence
tctatcattcgtgagatccgcgtggatcatgagagaaatgtccgtattatttttttgtgatttttatactactaacttacaccgtcctgtcggctcgtctgcaaggatcagcgtcgggcgcgtgatcagggcacgtccgattgccacgcgctgctgctgtccgcctgataactggctcggcaaatggttacggcgttccttcagattaagaaccgtaagcagttcttccagatattttttgtccggcttctgatagtcaa

SEQ ID NO: 34070 - DNA, 142 bp, Unknown
  Description of Unknown: RightRegion for integrase B8071 sequence
tcgtttgttgaatcggtgctggtgtatgaagacggaagcatggacattcattttttataatttttgtcgtactaactctgcattgcctgttggctcatcagccaaaattaattcgggatttgttattatcgcacgtgccact

SEQ ID NO: 34071 - DNA, 214 bp, Unknown
  Description of Unknown: RightRegion for integrase B8072 sequence
tctatcattcgtgagatccgcgtggatcatgagagaaatgtccgtattatttttttgtgatttttatactactaacttacaccgtcctgtcggctcgtcggccagcacgatagccggtttggtaatcagggcgcgggcaatcgccacacgctgctgctggccgccggaaagattgttcggcatatttttcagtttatcttccagccccagcagg

SEQ ID NO: 34072 - DNA, 260 bp, Unknown
  Description of Unknown: RightRegion for integrase B8073 sequence
gaagccatttatatagataaagaaagccgtaaactatgcggttttaaatttttactttaggggtgtagtaacatataaaaatccgttgaattcgagccgcatgccaccgctctggagcaaaaaggcgacggatatgtagtagcctcattaggcgaggattccggctatgttccctataccgctttttccgcaaagaaaagctatattgaagcgcatcccgatgttgttcaggcgtttaccaacgcccttcagaagggtat

SEQ ID NO: 34073 - DNA, 260 bp, Unknown
  Description of Unknown: RightRegion for integrase B8074 sequence
ataactattgatgaggaatctgtaaatataacttggagaattgaaagcaaaattgtatagtctatgttaatgggatttgggtgtaatgcttgtggtgtcactggttgtcgaattatcgaatctccaagggaacgaattatagctaccgtaacaaataattttgttccctgtaacggaagatttccaactttaattgcaataataactatgtttttcgccacagggatttcattaccatttcgttcgcttgtttcggcggg

SEQ ID NO: 34074 - DNA, 260 bp, Unknown
  Description of Unknown: RightRegion for integrase B8075 sequence
tctatcattcgtgagatccgcgtggatcatgagagaaatgtccgtattatttttttgtgatttttatactactaacttacaccgtcctgtcggttcatccgcaaggatcagctccggctttgtgatgattgcccgcgccaccgccgcacgctgtttttgtccaccggacacctcatacggatacttctccagaatatccacaatgccaagtttctgcgcaattggataaagccactcattcatctgcttataaggcacat

SEQ ID NO: 34075 - DNA, 260 bp, Unknown
  Description of Unknown: RightRegion for integrase B8076 sequence
tcctttgtcgaccgcgtacgcatctatgaggacggaagcatggacatcatttttttataaactcacttgtactaactaagcaccacccgtcggctcatcgcagagcaggagtttcggattcttggcgatcgcacgcgcgatagacacccgctgctgttctcctccggaaagctgcgccggaaagttatttttgcggtccgccagtcccacttttgtgagcatctccccggcatcgagcgaatttctgcacacctgcgccg

SEQ ID NO: 34076 - DNA, 260 bp, Unknown
  Description of Unknown: RightRegion for integrase B8077 sequence
tccttatccgaacaaattctgtttatcaacggtataatcggtatgcttgttcgccgataaggcgcagcccctctccgatttggagaggggttgctttttatttcacaatgcacctgtaatacgcacaaagcttttcctccgggccggggccgtccttgtccatcaagaacgcccgcgccagttccgcgtagaactccggcacgttgactccgaatttccgcgccacatcgtagtagtccgagtacatcatgttcatggta

SEQ ID NO: 34077 - DNA, 260 bp, Unknown
  Description of Unknown: RightRegion for integrase B8078 sequence
tcctttgtcgaccgcgtacgcatctatgaggacggaagcatggacatcatttttttataaacttacttgtactaactaagcaccacccgtcggctcatcacagagcagaatatccgggttcttgacgatcgcccttccgatggatactctctgctgctgaccgccggagagctgattcgggagcttgtatctgtgctcataaagtctcagcgtatgtaacagttcatcaatatccagcgcatgatcggacagatacgcgc

SEQ ID NO: 34078 - DNA, 260 bp, Unknown
  Description of Unknown: RightRegion for integrase B8079 sequence
tcgtttgttgaatcggtgctggtgtatgaagacggaagcatggacattcattttttataatttttgtcgtactaactctgcattgcctgtcggctcatctgcaagtatcaggcttggattgattatcagtgccctcgccaccgccgccctctgcttctgaccgcccgacacctcatacggatatttttttaacaacggctcaattccaagctgcaccgcaagcggtatcagtctccgcttcatctccgcatgcttctccc

SEQ ID NO: 34079 - DNA, 260 bp, Unknown
  Description of Unknown: RightRegion for integrase B8080 sequence
atgctgatagaaaaggtagtggtagaaggcgaaaacatacgtgtttactggaatttctagcccttgttattctcgaagtaagtatgttaatactttccttccccatggtatttccctttctttcatgtcatgattgcatatgggatttacagccctgcacggaagcttccttgcccgcgctcctgtcccagtccctgggcaggatgaaatccactgttctcagcagacggtccgtagacaccacttggacccgtatggtc

SEQ ID NO: 34080 - DNA, 260 bp, Unknown
  Description of Unknown: RightRegion for integrase B8081 sequence
atcatcaaagaagtctgcctcgatgaaaataaccaagtttctgaggtaatttttctttagtctgttttgttactaactgtataactccgtttggagtaagtggattagtatataactcttgaatacatagacatgtagaattgtggtttgcccggctgattaccgggctcttcttatgcctttttcacccggtcacgtccctgatactgagccaggatccagcctctggtgattcgcatatagatgcccctggttcccac

SEQ ID NO: 34081 - DNA, 109 bp, Unknown
  Description of Unknown: RightRegion for integrase B8082 sequence
attgtatcagatatacatgtggcgaaagactccactgtgaaagaagtgaattttttataataagtcttgcactaaccaatgagttccatttggggctgataagaccatg

SEQ ID NO: 34082 - DNA, 260 bp, Unknown
  Description of Unknown: RightRegion for integrase B8083 sequence
gaaaggagacagaaacgtgaatacagcaagaactgtgacggtgattcctgcaacgcttaatttgtttacaagtacgcctaaaatgtcacaaaacaaacgtaaagtggcggcatatgcaagagtttcaacagacaatgaagaacagctttcaagttacgcagcgcaggttgattattatactagatacataaaatcgaagacagaatgggattttgtggatatttatacagatgaaggaatcacagcaacaaatacgaaaa

SEQ ID NO: 34083 - DNA, 260 bp, Unknown
  Description of Unknown: RightRegion for integrase B8084 sequence
gttatatcagaaattcgtgttgaccgtgataataacatcacgggaattatttttgggtagtgttgtactaatgtgacactacctgttggttatgtataattagtacaaatagaaaaatacccggcagacctaaatttgccgggttcttcttttattctgttatatcgaatttttcgccacacatagggcagtacctgtcttcttgtgctactctctcatatccacatacttcgcatttaaagtaacatcttttttcagtt

SEQ ID NO: 34084 - DNA, 109 bp, Unknown
  Description of Unknown: RightRegion for integrase B8085 sequence
atcataaaaaaaataaacatagatgatgaaaaaaatattgaaatttatctaaatatttagagcatgaggctatttgatagctttgtgctttttgctttatggggctgta

SEQ ID NO: 34085 - DNA, 260 bp, Unknown
  Description of Unknown: RightRegion for integrase B8086 sequence
atcattcaggagattcatgtgaacgaagaccatgccatagcctccgtcgattttctgtgatgcgtcttgtactaactatactgttccatttggtgccgacaagaccatgactgctgtcctttccggaacagccgacatcggatttatgggatcagaggcttccatttatacttataatgaaggggctcgtgattatgtcgtaaactttgcacagctcactcagcgtgccggaaactttctggttgccagagatgatatca

SEQ ID NO: 34086 - DNA, 260 bp, Unknown
  Description of Unknown: RightRegion for integrase B8087 sequence
attataaaaagaataaatatagataatgaaaaaaacattgaaatttatctaaatatttaaaagcacaaagtttaaataactctgtgcttttatttctaagtaaacaatatttaaataagttttccaattttctggaaatcctaataaaaaaaatcgactctaacatgagccacataactaaaagtcagaggtgtgtaagagtctatatcatatgtaaatgatatcataataattatttaaagtcaaacattttttgcctt

SEQ ID NO: 34087 - DNA, 260 bp, Unknown
  Description of Unknown: RightRegion for integrase B8088 sequence
attatatcagatatacatgtgacgaaagactctactgtgaaagaagtgaattttttataataagtcttgcactaaccaatgagttccatttggagtcatatagttagtgcaaaacttttacaccgctaccctacatactttttaccggaatagtatgctgcaatccagccgcttggaatcttgatccagatgtcacttccgttcttgcggacctccttgcaggttacgcgcgtgcctttcttgagtctcccgttatcgtg

SEQ ID NO: 34088 - DNA, 109 bp, Unknown; identical to SEQ ID NO: 34081
  Description of Unknown: RightRegion for integrase B8089 sequence

SEQ ID NO: 34089 - DNA, 260 bp, Unknown
  Description of Unknown: RightRegion for integrase B8090 sequence
atgcttatagaaaaagtagtggtagaaggcgaaaacatacgtgtttactggaatttctagcctttgttattctggtagtaagtatgttaatactttccttccccatggtgtttccctttctttccagtcatgattgcatgtatgacttacagccttacacggaagcttccttacccgcgctcctgtcccagtcccggggcaggataaaatccactgtcctaagcagacggtccgtggacgccacctgaacccgtatgggc

SEQ ID NO: 34090 - DNA, 260 bp, Unknown
  Description of Unknown: RightRegion for integrase B8091 sequence
ctccgtcgtccagaggaaaagggcaaaccctataagtatttccgtgtagaatttaactgaaccacaaaaaacaccaggcaggagctttcccgtctggtggttttatacatttattaagttttatgcatagcctttatgcaaaattatacccctggttttccagtacgccctcttttggtcattggaatgccagctttgcacagtgggcattcttctggcttgtaggtctgtacatccatatggagcaatgcagtgcttgg

SEQ ID NO: 34091 - DNA, 260 bp, Unknown
  Description of Unknown: RightRegion for integrase B8092 sequence
atcatatccgaaatcaaggtggaccgtgataataacatcacggatattatttttagctaatatccgtactaattatacataacctgtcggtgctgttcaattagtacgtacttggaaaagcctagaattatcacgttcttaggctttttcatgcttttaaaatcattcatacaaaccttgaattttcctatatccattcaaaaaacactttttgcatattgtgccgcaaacgaaatcaaactcaatatccgataatatcc

SEQ ID NO: 34092 - DNA, 260 bp, Unknown
  Description of Unknown: RightRegion for integrase B8093 sequence
gtcatatcggaaattcgtgttgaccgtgataataacatcacgggaattatttttgggtagtgttgtactaatgcgacactacctgtgggttcatctgccagaatgatagcgggtgccgctgccagtgcacgggcaatggctacccgctgctgttgaccacctgagagctgattgggcagtgcatccagacggtcactcaatccaagcgtctgcccgatctgcttcacaaaagatttatttacctttccaccatccagttc

SEQ ID NO: 34093 - DNA, 260 bp, Unknown
  Description of Unknown: RightRegion for integrase B8094 sequence
tctattattgataaaatatatgtagaaaatggcgaaataaaagagattacatttctgtaacctcttttatttttagtcgttcgtctcgattggtgctccgactggacatactcctgcgcaagttccacatgatatacattgttctggatctataacatatttatcttcaccttgtgctatacattccataggacattgtgctgcacatgctccgcatgatatacatttgtcagtaattttataagccattaaactcacca

SEQ ID NO: 34094 - DNA, 260 bp, Unknown
  Description of Unknown: RightRegion for integrase B8095 sequence
atcctcattaagaaagtagaggtagatggtgaaaacatacgtgtttactggaacttctagcatttgttaatttgaaagaaagtattttgaaactctctttccccatcctcttatcctcctgttattcctccgcagaagtgctcgcgggaataaagtcgatcgtcctggccagcttatccgttcccgtgaccatgacgcggatcggctgaccgagtttatataccttcctcgtcatatcgccgatcaattctaaatgctct

SEQ ID NO: 34095 - DNA, 260 bp, Unknown
  Description of Unknown: RightRegion for integrase B8096 sequence
atcatatccgaaatcaaggtggaccgtgataataacatcacggatattatttttagctaatatccgtactaattatacataacctgtcggtgctgttcaattagtacgtacttgaaaaagcctagaattatcacgttcttaggctttttcatgcttttaaaatcattcatacaaaccttgaattttcctatatccattcaaaaaacactttttgcatattgtgccgcaaatgaaatcaaactcaatatccgataatatcc

SEQ ID NO: 34096 - DNA, 260 bp, Unknown
  Description of Unknown: RightRegion for integrase B8097 sequence
atcatcaaagaaatctgtatcgatgaaaataaccaggtttcagaggtgatttttctttagcctgtcatgttactaactatataaccccatttggcgtacgttagttagtaacatgacgttcagcattataataaggtaagattgtggtattgccccggtgactatccggggttcttcttgtttatggctcacttgtacaaaactatcatttttcatacttttgaaaccctgtttttaccctgatactgagccaggaccca

SEQ ID NO: 34097 - DNA, 109 bp, Unknown
  Description of Unknown: RightRegion for integrase B8098 sequence
aagaatgacaataaaaagaaacgtcgttcccttaaaataaaggatatcgagttctattaatattttatggaagtatgaacaattaaccaaccatggctgtattccatct

SEQ ID NO: 34098 - DNA, 260 bp, Unknown
  Description of Unknown: RightRegion for integrase B8099 sequence
gtgctgaaagagatccgtattgataacgatcagaatattactggtatttcatttttttagcctattgttgtactaatgttacagaaccggtgggttgtgtaaacttagtataacaaatacaagccccagcatttctgccggggctttcttaaattccgcatatttgcggttatttcacatatacatctccatcataatatgccgcaatccatccagacggtaccagaatccagatatcacttcctacattcttgacggcc

SEQ ID NO: 34099 - DNA, 109 bp, Unknown
  Description of Unknown: RightRegion for integrase B8100 sequence
atcattcaggagattcatgtgaatgaagaccacgccataacctccgtcgattttctgtgatgcgtcttgtactaactatactgttccattcggagccgacaaaactatg

SEQ ID NO: 34100 - DNA, 137 bp, Unknown
  Description of Unknown: RightRegion for integrase B8101 sequence
atcatatccgaaatcaaggtggaccgtgataataacatcacggatattatttttagctaatatccgtactaattatacataacctgtcggctcatcagccaaaataatatctggattagaaatcaaactacgggctg

SEQ ID NO: 34101 - DNA, 133 bp, Unknown
  Description of Unknown: RightRegion for integrase B8102 sequence
gggcagaacacggctactatctcgtgttcggatattgcgtgttccgctccaccattttaatcgctggtcgaaccccaggcggcgagattatcgtcttgccttacggtttcgcgctggcggccaagttagagag

SEQ ID NO: 34102 - DNA, 260 bp, Unknown
  Description of Unknown: RightRegion for integrase B8103 sequence
attgtatcagatatacatgtggcgaaagactccactgtgaaagaagtgaattttttataataagtcttgcactaaccaatgagttccatttggggctgataagaccatgaccgcagtcatatccggaaccgccgatattggatttatggggtctgaagcttcaatttatgcttacaatgaaggagccaatgattatgtcgtgaactttgcacaacttacacaacgcgcaggaaattttctggtagcaagagaagaaatcc

SEQ ID NO: 34103 - DNA, 260 bp, Unknown
  Description of Unknown: RightRegion for integrase B8104 sequence
gcgggaaagacagacttggtcaaatttttgccgatttcgggcttctctggcggaatttgaacttcaaagagcaatatgatttagtggatttgctaatcgaaaaaattgtttacgacggcaccaaaggttcgattttcatcaaattttacgacgacggtttgaactgctttaaggaagacctcaaatgattatagaacggaaaatacacattcagaataaacggcacggtcggagaaaactttgtatcggagaatgtccgg

SEQ ID NO: 34104 - DNA, 260 bp, Unknown
  Description of Unknown: RightRegion for integrase B8105 sequence
atcattaaagcgatctatgttacaaaagatcgtaacgtggattatgtagattttttatagatctatatctgttgtactaactatatcgtgccatttggcgttatacggttagtacaacactaattgcataacgaaactgggagagaaaggacaccaggttaaaaacgtgagggtgtcggcgagcctatcaaatgaatcgtcggggctttcgatctgcgtctatcagattgaaataacctcaggggttgaagaacgtgcaa

SEQ ID NO: 34105 - DNA, 260 bp, Unknown
  Description of Unknown: RightRegion for integrase B8106 sequence
tctatcatcaaagaaattcaagtagatcatcacaaaaatattaacattgtttttctgtaaatatacgaaaagccggggatttcccggcttttcataactttattttttatagtactaactaacactatccattaggtttaggtcctgcaatataatcacgttccttcataacaattaagtctgtttgactttttaaaatctcaacaagattatatatatcattgacaaaatagcaaataactcttgcacctgcaatatcc

SEQ ID NO: 34106 - DNA, 159 bp, Unknown
  Description of Unknown: RightRegion for integrase B8107 sequence
aaagacaaaaaacataagacaaacacacttgatatcaacagtattcattttaaattttaatagcagttgtgtcactatttaggtctatcgtgtgacaaaactaacatacaaaaaccacgctcatttagaacgtggctagtagaatatagtgtcgataag

SEQ ID NO: 34107 - DNA, 260 bp, Unknown
  Description of Unknown: RightRegion for integrase B8108 sequence
actcgaaattatattgaccgcaatatagtgattaaccgattgtactctcttgcttcctagtttatgctataattatgtagttgtaacaacataatatcagaaacaaggcccggtgtctagccgagccttattttatttttgaaaacaattccagaataaagcctaatccttttctttcggtttccactctgtgcgatacgctgctacatccagtgtttccacgccggcgcgtatttttttcaatgcgtcacgcacaaaat

SEQ ID NO: 34108 - DNA, 260 bp, Unknown
  Description of Unknown: RightRegion for integrase B8109 sequence
ataattaaagaaatataccctatacctgatacagaaaattttaagattatttttaaataatacttgtacttatttaaccttacacggtggttagggataataactacaaaaaaataaaaaaactttaaaaaaagtattgacatagtattaatactatgttataatatatataagaaaggaggtaagatataatgaagccgagtaaaaatcgggaaaaaagaaaaaaactaacaattaaagaattctcattcaaaatcaat

SEQ ID NO: 34109 - DNA, 260 bp, Unknown
  Description of Unknown: RightRegion for integrase B8110 sequence
gaagaaattttagtggatcctgatacacgaaaaattaaagacgtgaaattgctcatataagaaaacgagggcagtattctaccttacacggtcgagttcgagcccttcgccaccacccttgaaaccgaaggaaatggtaccgttgtcgcctcgctcggcgtcgattccggttatgtcccctacaccgcctactgtgcaaagcagagctatctaaataggcatccggaaattatccagtcgttcacgaatgccatccagaa

SEQ ID NO: 34110 - DNA, 260 bp, Unknown
  Description of Unknown: RightRegion for integrase B8111 sequence
attatagattctattgagtttgttaatgattacagattctatattcatttaaaattctaggaggaactatggggtttattctaactgaaaagatttttaatcattatagtaaaaaagaattaggagacattttgtctcctaaagtttttactcaattatctaccaatactaaaatcctgccttggttttcggaacttgcgaaagtgatagatataaaaaaaataggatatactttagaagattttaaacatgattatcaa

SEQ ID NO: 34111 - DNA, 260 bp, Unknown
  Description of Unknown: RightRegion for integrase B8112 sequence
aagttaaaacgcggtaaagctagcaattcgatgaagattaaagatattgaattctattaattttgtacggaagtagatactatctttcaacattggttgtattcctacaaagacactcattcatgatggacttcataaccgttcatttgctgatgcttttgcaagaaaaaatgaagtcgtatcagcattaaataagaaaaattatggaaatttagcaaatgatacgcatattgatgttttggactataaagctacgttca

SEQ ID NO: 34112 - DNA, 260 bp, Unknown
  Description of Unknown: RightRegion for integrase B8113 sequence
tctatcatcaaagaaattcaagtagatcatcataaaaatattaacattgtttttctataaatatacgaaaagccggggatttcccggcttttcatatatttattttttatagtactaacttacactatccattaggtttaggtcctgcaatataatcacgttccttcataacaattaagtctgtttgactttttaaaatctcaacaagattatatatatcattgacaaaatagcaaataactcttgcacctgcaatatcc

SEQ ID NO: 34113 - DNA, 109 bp, Unknown
  Description of Unknown: RightRegion for integrase B8114 sequence
tctatcatcaaagaaattcaagtagatcatcacaaaaatattaacattgtttttctgtaaatatacgaaaagccggggatttcccggcttttcataactttatttttta

SEQ ID NO: 34114 - DNA, 109 bp, Unknown
  Description of Unknown: RightRegion for integrase B8115 sequence
gaagaaattttagtggatcctgatacacgaaaaattaaagacgtgaaattgctcatataagaaaacgagggcagtattctaccttacacggtcgagttcgagcccttcg

SEQ ID NO: 34115 - DNA, 109 bp, Unknown
  Description of Unknown: RightRegion for integrase B8116 sequence
cttatttcagaaattcactttaaagacaatcgggtgtctgaaatcatttttaatgtgtagttttttgctacattaagtatggactaactacccttatacatcagcacaa

SEQ ID NO: 34116 - DNA, 260 bp, Unknown
  Description of Unknown: RightRegion for integrase B8117 sequence
gagatacgtgttcacaagagtgttcgtcgtagccgaaaatacgatatcgattttttatagtttagttttacctctaatgaatagtatccgaccggaaactggccgggcaaaaccgtgtccaacgcccagggctggtgcaaaaccgggcgtcacgggtacgtgctggtggatattcccggaacctattccctgatggcccattccgctgaggaagaggtggccagaaatttcatctgcttcggcaaaagcgacgccgtggt

SEQ ID NO: 34117 - DNA, 260 bp, Unknown
  Description of Unknown: RightRegion for integrase B8118 sequence
tctatcatcaaagaaattcaagtagatcatcataaaaatattaacattgtttttctataaatatacgaaaagccgggaatttcccggcttttcataactttattttttatagtactaacttacactatccattaggtttaggtcctgcaatataatcacgttccttcataacaattaagtctgtttgactttttaaaatctcaacaagattatatatatcattgacaaaatagcaaataactcttgcacctgcaatatcc

SEQ ID NO: 34118 - DNA, 260 bp, Unknown
  Description of Unknown: RightRegion for integrase B8119 sequence
gaagaaattttagtagatcctgatacacgaaaaattaaagacgtgaaattgcttatataagaaaacaagggcagtattctatcttacacggtcgagttcgagcccttcgccaccacccttgaaaccgaaggaaatggcaccgttgttgcctcactcggcgtcgattccggttatgtcccctacaccgcctactgtgcaaagcagagctatctaaatgggcatccggaaattatccagtcgttcacgaatgccatccagaa

SEQ ID NO: 34119 - DNA, 196 bp, Unknown
  Description of Unknown: RightRegion for integrase B8120 sequence
atcattaaagcgatctatgttacaaaagatcgtaacgtggattatgtagattttttataggtctatatctgttgtactaactatatcgtgccatttggggcagataaaactatgactgccgtcatatccggcgaggcggacatcggatttatgggagcagaagcatctatctatgcctatcaggaaggagctactg

SEQ ID NO: 34120 - DNA, 109 bp, Unknown
  Description of Unknown: RightRegion for integrase B8121 sequence
aaagacaaaaaacataagacaaacacacttgatatcaacagtattcattttaaattttaatagcagttgtgtcactatttaggtggcacctgtaccacccatagttacc

SEQ ID NO: 34121 - DNA, 145 bp, Unknown
  Description of Unknown: RightRegion for integrase B8122 sequence
aaagataaaaaacataagacaaacacacttgatatcaacaatattcactttaaattttaatagcagttgtgtcactatttaggtctatcgtgtgacaaaactaacatacaaaaataccgtatctattaagatacggtttaatctc

SEQ ID NO: 34122 - DNA, 260 bp, Unknown
  Description of Unknown: RightRegion for integrase B8123 sequence
tctatcatcaaagaaattcaagtagatcatcataaaaatattaacattgtttttctgtaaatatacgaaaagccggggatttcccggcttttcataactttattttttcatagcactaacttacactatccattaggatagtgttagttagtgctatgaaattattatggcatcatcttcactacaaatgagtttttaaaagcatttctgttcactattattttatgattattttcaaatatttttatatatctcatcat

SEQ ID NO: 34123 - DNA, 260 bp, Unknown
  Description of Unknown: RightRegion for integrase B8124 sequence
agaatgttaataaatagaattacaatcaatgataacaatatcaatatagatttaaaatgatttttcgactaagtacaatcatcggaaccgcataggtggagaactttacgcccagtgcaggattgaagttgtcgatggatttgatcagaccgatgcatccaatctgaaagagatcatctacgttctcgtggttcccggaaaagcgcttgattacacttaagacgaggcggaggtttcccttgatgtaagtttcgcgggca

SEQ ID NO: 34124 - DNA, 260 bp, Unknown
  Description of Unknown: RightRegion for integrase B8125 sequence
tctatcatcaaagaaattcaagtaaatcatcataaaaatattaacattgtttttctataaatatacgaaaagccggggatttcccggcttttcataactttattttttatagcactaactgatactagccattaggtttaggtcctgcaatataatcacgttccttcataacaattaagtctgtttgactttttaaaatctcaacaagattatatatatcattgacaaaatagcaaataactcttgcacctgcaatatcc

SEQ ID NO: 34125 - DNA, 260 bp, Unknown; identical to SEQ ID NO: 34105
  Description of Unknown: RightRegion for integrase B8126 sequence

SEQ ID NO: 34126 - DNA, 260 bp, Unknown
  Description of Unknown: RightRegion for integrase B8127 sequence
attatagattctattgagtttgttaatgattacagattctatattcatttaaaattctaggaggaactatggggtttattctaactgaaaagatttttaatcattatagtaaaaaagaattaggagacattttgtctcctaaagtttttactcaattatctaccaatactaaaatcctgccttggttttcggaacttgcgaaagtgatagatataaaaaaaataggatatactttagaagattttaaacatgattatcca

SEQ ID NO: 34127 - DNA, 260 bp, Unknown
  Description of Unknown: RightRegion for integrase B8128 sequence
tctatcatcaaagaaattcaagtagatcatcataaaaatattaacattgtttttctgtaaatatacgaaaagccggggatttcccggcttttcataactttattttttcatagcactaactgacactatccattaggtttaggtcctgcaatataatcacgttccttcataacaattaagtctgtttgactttttaaaatctcaacaagattatatatatcattgacaaaatagcaaataactcttgcacctgcaatatc

SEQ ID NO: 34128 - DNA, 260 bp, Unknown
  Description of Unknown: RightRegion for integrase B8129 sequence
gaaaatattaatgtggatccgaaaacccgtagaataagcgggattaaattattgatttaagggcagtattcaatcttataccattgtgtaatgttttttactgccctcaattattctactgaagaagccccggccaccgcaacgccccatcctgatccggcgtaagcgttaccggctccacaaccatccggccctgatcgtccatgatgtaccacttgccgtcaatggtcttctggcctgttaccatcgctccgtcagtg

SEQ ID NO: 34129 - DNA, 260 bp, Unknown
  Description of Unknown: RightRegion for integrase B8130 sequence
atcattaaagcgatctatgttacaaaagatcgcaacgtggattatatagattttttatagaatctacatctgttgtactaactatatcgtaccatttggcgttatgcagttagtacaacactaattgcataacgaaactgggagagaaaggacaccaggttaaaaacgtgagggtgtcggcgagcctatcaaatgaatcgtcggggctttcgatctgcgtctatcaggtcgaaataacctcaggggttgaagaacgtgca

SEQ ID NO: 34130 - DNA, 147 bp, Unknown
  Description of Unknown: RightRegion for integrase B8131 sequence
atcattaaagcgatctatgttacaaaagatcgtaacgtggattatgtagattttttataggtctatatctgttgtactaactatatcgtgccatttggggcagataaaactatgactgccgtcatatccggcgaggcggacatcgga

SEQ ID NO: 34131 - DNA, 260 bp, Unknown
  Description of Unknown: RightRegion for integrase B8132 sequence
ctgatcggcgagttcgccccaaggggcatcggcgcggaactggtggaggtcgaagcctgatgaacgacacactggaaaccttcgtgccactgacattccgccgccggggcgcgcggcgcgtggccgccgacgaccgccatgttcacgatgtgacgttgctggagggggtggcacgcggtttctactggcagcacctcgtggacaccggcgagatgaagagtggctcggagatcgcccgggccgaaggcttacacccatcg

SEQ ID NO: 34132 - DNA, 260 bp, Unknown
  Description of Unknown: RightRegion for integrase B8133 sequence
agtattattgataaaatcatcatttcagacggtggagatattgagatagtatttttatgatgtttgttgtactatctcatacgctcctgtcggctcatctgcaagaagaatcgcaggctctccgactaatgctcttgcgattgccactctttgcttctgaccacccgaaagttcatttggtttatgatttatcctttccttaagaccgagcatttctatcgtatccatgcacatctcctgtgcctcttcatgctcatatc

SEQ ID NO: 34133 - DNA, 260 bp, Unknown
  Description of Unknown: RightRegion for integrase B8134 sequence
agtattattgataaaatcatcatttcagacggtggagatattgagatagtatttttatgatgtttgttgtactatctcatacgctcctgtcggtgcgttatagttagtacaacattgtgaccgaattggacacaaaagcggtaaaccttggattttcccttggtctaccgctttttatttacatcacttttgttaattcagttaattctttaaaaattctttccgcttcttgccctctaaagtctttcaatacaacttta

SEQ ID NO: 34134 - DNA, 160 bp, Unknown
  Description of Unknown: RightRegion for integrase B8135 sequence
attattaagaaaattgagattaacaatgacggtgaaatcaccggtatttttttcggctagtagtgtactaactgtacactacctgtaggtaatgtttaattagtacacactataaaagttaatattccctcccagattgccagtctgggaggatttttct

SEQ ID NO: 34135 - DNA, 139 bp, Unknown
  Description of Unknown: RightRegion for integrase B8136 sequence
agtattattgataaaatcatcatttcagacggtggagatattgagatagtatttttatgatgtttgttgtactaactataacgctcctgtcggctcatctgcaaatataatttccggacgattcaccagtgctcttgca

SEQ ID NO: 34136 - DNA, 260 bp, Unknown
  Description of Unknown: RightRegion for integrase B8137 sequence
gaaatacaggtacctaaaagcgtgaatcgtcatagaaagtataagataatacctttataatttagttttacctcttataagtattaaccgacaggaaactggccgggaaaaaccgtgaccaatgcccagggctactgtaagacaagagaacacagctacgtgctggtagatatccccggcacctactccctcatggcccactccacggaggaggaagtggcccgcaacttcatctgctttggcggaagcgacgggattgt

SEQ ID NO: 34137 - DNA, 260 bp, Unknown
  Description of Unknown: RightRegion for integrase B8138 sequence
agtattattgataaaatcatcatttcagacggtggagatattgagatagtatttttatgatgtttgttgtactatctcatacgttcctgttggctcatcagccaaaattaattcgggatttgttattatcgcacgtgccactgctgccctttgcttctgtcctcctgacacctcgtatggatatttattaagcagcttttcaattccaagcagcgaagctataggtgcaagccttttttccatatccctatagtccacac

SEQ ID NO: 34138 - DNA, 260 bp, Unknown
  Description of Unknown: RightRegion for integrase B8139 sequence
agtattattgataaaatcatcatttcagacggtggagatattgagatagtatttttatgatgtttgttgtactatctcatatgctcctgttggttcatctgccagaacaattgccggacggttgatcagtgcccgcccgatggatacgcgctgctgctgtccgccggagagttcttccggaagatgcgtttttcttccgttaagtcccagctcatcgatcagtttatccagacgctttttatccaccgtctgtccgtcaa

SEQ ID NO: 34139 - DNA, 260 bp, Unknown
  Description of Unknown: RightRegion for integrase B8140 sequence
agtattattgataaaatcatcatttcagacagcggagatattgagatagtatttttatgatgtttgttgtactaactataacgctcctgtaggttcatccgcaagaatgatcgccggatcatttgccatcgcgcgggcgatcgcaactctctgcttctgcccgccggaaagttcgtccggcgtatgtgacatgcgttccttcataccgaccacctctaacagttctgccgcccgttttgcccgcacctttttggagacgc

SEQ ID NO: 34140 - DNA, 260 bp, Unknown
  Description of Unknown: RightRegion for integrase B8141 sequence
gtgttgaaagagatccgtattgataatgaccagaatatcactggtatttcatttttttagcctattgttgtactaatgttacagaaccggtgggttgtgtaaacttagtataacaaatacaagccccagcatttctgccggggctttcttaatttccgcatatttgcggttatttcacatatacatctccatcataatatgctgcaatccatccagacggtaccagaatccagatatcactgcctacgttcttgacggcc

SEQ ID NO: 34141 - DNA, 260 bp, Unknown
  Description of Unknown: RightRegion for integrase B8142 sequence
ttaattagccaaatctcaatcgatggcgaacgaattgtagtaaaatggcgcgtaaaataaagaaaaaagcccgaaacatcggattttccgacgttttgggcttatattttatatgccttaatgaagtaacgctgtaaatattaacctcaaaaggcatacacggaaagcccaatccgtatatgccttttttgtttttattataactgaaaagtatttgtttgtcaatattcccccgaaagatttttacatcatatccgggt

SEQ ID NO: 34142 - DNA, 94 bp, Unknown
  Description of Unknown: RightRegion for integrase B8143 sequence
agtattattgataaaatcatcatttcagacggtggagatattgagatagtatttttatgatgtttgttgtactatctcatacgctcctgtcggc

SEQ ID NO: 34143 - DNA, 260 bp, Unknown
  Description of Unknown: RightRegion for integrase B8144 sequence
gaaatacaggtacccaaaagcgtgaatcgccataggaaatataagataatgcctttataattttgttttacctctaacacattgtaaccgacaggaaactggccgggaaaaaccgtgaccaatgcccagggctactgtaagacaagggaacacagctacgtgctggtagatatccccggcacctactccctcatggcccactccacggaggaggaagtggcccgcaacttcatctgctttggcggaagcgacggggttgt

SEQ ID NO: 34144 - DNA, 139 bp, Unknown
  Description of Unknown: RightRegion for integrase B8145 sequence
agtattattgataaaatcatcatttcagatagcggagatattgagatagtatttttatgatgtttgttgtactatcttatacgctcctgttggttcatccgctaaaactaatttaggctcattaataattgccctagca

SEQ ID NO: 34145 - DNA, 260 bp, Unknown
  Description of Unknown: RightRegion for integrase B8146 sequence
tcgggttcggatattgagggttttactccactaaaaaaacaagtcgaactttttgtatgaaggaatcatataagaagtccggcttgtttttggtaatgaagaaaattataatagaactgaatttaaaggaaaaaagtatatgacgttttgcggacgttattgtaggaaatgtctcagtgccataaatgaaaataaggagtgtgaaaactatgcaccagacaggacagatatacagaccgccatcagaagccagtgtacag

SEQ ID NO: 34146 - DNA, 142 bp, Unknown
  Description of Unknown: RightRegion for integrase B8147 sequence
agtattattgataaaatcatcatttcagacggcggagatattgagatagtgtttttatgatgtttgttgtactatcttatacgctcctgtcggttcgtcggcaagcacaactgccggtgcattcatcaatgctcttccaatg

SEQ ID NO: 34147 - DNA, 260 bp, Unknown
  Description of Unknown: RightRegion for integrase B8148 sequence
agtattattgataaaatcatcatttcagacggtggagatattgagatagtatttttatgatgtttgttgtactatctcatacgctcctgtaggctcatctgccaaaatcagggacggatccccggccaatgccctggctatagaaacacgctgctgctgaccgccagataactggtttggcatatttttccacttttctgccagacctaccttttccaaagaagccatagcacgcttctttcgctcctcacttcccactc

SEQ ID NO: 34148 - DNA, 260 bp, Unknown
  Description of Unknown: RightRegion for integrase B8149 sequence
agtattattgataaaatcatcatttcagacagcggagatattgagatagtatttttatgatgtttgttgtactatcttatacgctcctgtaggctcatcggcaagaatcaatgccgggcgatttgccagtgctcttgcgatcgctgcacgctgctgctgtccaccagataactggtttggaagatgcttccgtctgtccttcagacctaacatctcgataatatgatcgatgtaatcgcgatccggctttctgtgatcga

SEQ ID NO: 34149 - DNA, 260 bp, Unknown
  Description of Unknown: RightRegion for integrase B8150 sequence
tcagacggtctgcatttgaccttctgcttgaaggacggtactcaaattgaatataattaaaaaagacacacagccgtgaagctgtgcgccttgggattaacctttcttaacgagtccctggacgatggatgcaatgctatctaattgtttgtcgtccagtctctttaggtctttaataagctcgttcaatttttcagggttctttgcatcggtgtcaaagaagtccttgggagaaagctgtaaatattcgcagatataga

SEQ ID NO: 34150 - DNA, 260 bp, Unknown
  Description of Unknown: RightRegion for integrase B8151 sequence
agtattattgataaaatcatcatttcagacagcggagatattgagatagtatttttatgatgtttgttgtactatctcgcacgctcctgtgggttcatctgccagaagaatagccggttcagatgccaatgctctggcgatagatacacgctgcttctgtccaccagacaactcattgggtctgtggtcaagtctgtgatcaatacccaataatttcacgatatcctggcatttttcactggcttcccgatgtcccatgc

SEQ ID NO: 34151 - DNA, 260 bp, Unknown
  Description of Unknown: RightRegion for integrase B8152 sequence
gcgggagtcgaagtttatccccccttgcgggggaaatcccttcaggtccaccaaaaataagccccccgcagaggtggctttatttttgtcgtgggcctagggattcgaggtttatgccctgaaagggtaaatcccttcagacctaccaggcattcagaaccatctggaaattggattattctgaattttcctttcggttgaagaaaacagctactctcgtttatgcaaaatcagaagcactcgactactacataagtcaa

SEQ ID NO: 34152 - DNA, 139 bp, Unknown
  Description of Unknown: RightRegion for integrase B8153 sequence
agtattattgataaaatcatcatttcagacagcggagatattgagatagtatttttatgatgtttgttgtactatcttatacgctcctgtcggctcatctgcaaatataatttccggacgattcaccagtgctcttgca

SEQ ID NO: 34153 - DNA, 89 bp, Unknown
  Description of Unknown: RightRegion for integrase B8154 sequence
agtattattgataaaatcatcatttcagacggtggagatattgagatagtatttttatgatgtttgttgtactatctcatacgctcctg

SEQ ID NO: 34154 - DNA, 187 bp, Unknown
  Description of Unknown: RightRegion for integrase B8155 sequence
agtattattgataaaatcatcatttcagacggcggagatattgagatagtatttttatgatgtttgttgtactatctcatacgctcctgtcggttcatcggcaaggatcatttggggatgtaagatcagagcccttgctgccgcaacacgctgacgctggccaccggacatcttggacggaaactta

SEQ ID NO: 34155 - DNA, 260 bp, Unknown
  Description of Unknown: RightRegion for integrase B8156 sequence
agtattattgataaaatcatcatttcagacagtggagatattgagatagtatttttatgatgtttgttgtactatctcatacgctcctgtaggttcatctgccaaaacaacagaacattttttcatcataagacgagctaaagcaactctctgttgttcaccaccggaaagctgataaacttttttgttaacttcctttgataaccccacacgattaagagcttctttaagtgatactttagttcggcttgattttttaa

SEQ ID NO: 34156 - DNA, 260 bp, Unknown
  Description of Unknown: RightRegion for integrase B8157 sequence
agtattattgataaaatcatcatttcagacggtggagatattgagatagtatttttatgatgtttgttgtactatctcatacgctcctgttggctcatctgccaaaataatatcggggtcggaaatcaaactgcgggcggcagcgacgcgctgtttttgaccacctgacatctgcaccggaaatttggagagcacatccgtgattccaaaaagtcctgcaatgtcattcaacttcttctccgcagcagatatatctacat

SEQ ID NO: 34157 - DNA, 260 bp, Unknown
  Description of Unknown: RightRegion for integrase B8158 sequence
agtattattgataaaatcatcatttcagacggtggagatattgagatagtatttttatgatgtttgttgtactatctcatacgctcctgtaggttcatccgccaaaatcagtttgggctttgtgattaacgcccgtccaatggcgacacgctgctgctgtccgccggatagttgatttggcaggtggtgccgacgttcggtaaggcccaagagatccaagatttcttctaccgctgccggatctggcttgcgatagtcca

SEQ ID NO: 34158 - DNA, 260 bp, Unknown
  Description of Unknown: RightRegion for integrase B8159 sequence
agtattattgataaaatcatcatttcagacagcggagatattgagatagtatttttatgatgtttgttgtactatctcatacgctcctgtgggctcatctgccagaataatctgagggttagtaataagagctctcgcaaccgctgccctctgcttctgtccacctgacacctcatatgggaactttcctaatatagactcaattcccagctcctttgcaattggcttaagcttctcttgcatgctatcatacttctccc

SEQ ID NO: 34159 - DNA, 260 bp, Unknown
  Description of Unknown: RightRegion for integrase B8160 sequence
agtattattgataaaatcatcatttcagacagtggagatattgagatagtatttttatgatgtttgttgtactatcttatacgctcctgtcggctcatctgcaaatataatttccggacgattcaccagtgctcttgcaattgctactctctgctgctgtcctccggataactgatttggcagattataaatccggttttcaatccccagagttgcaatgatatcatttacatacgcttcatccacttttcttccatcca

SEQ ID NO: 34160 - DNA, 260 bp, Unknown
  Description of Unknown: RightRegion for integrase B8161 sequence
agtattattgataaaatcatcatttcagacggtggagatattgagatagtatttttatgatgtttgttgtactatctcatacgctcctgtaggctcatcacataaaatggcttccggagatactgcaagcgcccttgcgattgcaactctttgttgttcaccgccggacaaattgattgggtaatcattttccttgctttctaagccgacactttttagcaagcctgtaattatctcgtgacgctgtttggcggtaaacg

SEQ ID NO: 34161 - DNA, 260 bp, Unknown
  Description of Unknown: RightRegion for integrase B8162 sequence
agtattattgataaaatcatcatttcagacggtggagatattgagatagtatttttatgatgtttgttgtactatctcatacgctcctgtcggttcatcagcaaggataatcgcaggcttcgtaattaaagctcgtgcaatcgctacacgttgctgttgaccgcctgaaagattgttcggcatattttccagtttatcttctaaagccaacatatacacaacttcgtccataaatttctggtctactgtatcgccatcca

SEQ ID NO: 34162 - DNA, 260 bp, Unknown
  Description of Unknown: RightRegion for integrase B8163 sequence
gtgctgaaagagatccgtattgataatgaccagaatatcactggtatttcatttttttagcctattgttgtactaatattacagagccggtgggttgtgtaaacttagtataacaaatacaagccccagcatttctgccggggctttcttaatttccgcatatttgcggttatttcacatatacatctccatcataatatgctgcaatccatccagacggtaccagaatccagatatcactgcctacattcttgacggcc

SEQ ID NO: 34163 - DNA, 260 bp, Unknown
  Description of Unknown: RightRegion for integrase B8164 sequence
agtattattgataaaatcatcatttcagacggcggagatattgagatagtgtttttatgatgtttgttgtactatctcatacgctcctgttggctcatctgccaagatcaacgcaggttcatttgcaatcgctctagcaattgcaacgcgctgcttctgacccccggaaagattactcacaggcttatcgacaaaatcttgcatctgcaccatttcaagcattttgcgcgcgatttctttcctgtcttttttccgttttt

SEQ ID NO: 34164 - DNA, 260 bp, Unknown
  Description of Unknown: RightRegion for integrase B8165 sequence
agtattattgataaaatcatcatttcagacggcggagatattgagatagtatttttatgatgtttgttgtactatctcatacgctcctgtaggtgcgttatagttagtacaacattgtgaccgaatcggacacaaaaggcggtaagccttgatttctcttgacttaccgccttttttaattactcttccgacacatacacatcaaaatcctcttcattgtagctttctccgtattctgccagttctacccaacttgcaca

SEQ ID NO: 34165 - DNA, 260 bp, Unknown
  Description of Unknown: RightRegion for integrase B8166 sequence
aggatgattattaataaaatcactatcacagataataatatcaatgttgattttaaataatttcgactaggtacattcatcggcacggcatatgtggaaaattttacccccatatccgggttaaagttatcaatggatttgatcagaccgatacatccgatctgaaacaggtcatctacattttcattgtgattcgaaaaacgtttgatgacacttaaaacgagccgcagatttcccttaatgtaagtttccctggcagc

SEQ ID NO: 34166 - DNA, 109 bp, Unknown
  Description of Unknown: RightRegion for integrase B8167 sequence
tcttttatcgattgtatatatgtggatgataaaagaaatttccgtgttaaatttttgtaattatgcatatggtactaactgcgcttgacctgtattgagcgcctgcagc

SEQ ID NO: 34167 - DNA, 142 bp, Unknown
  Description of Unknown: RightRegion for integrase B8168 sequence
agtattattgataaaatcatcatttcagacagcggagatattgagatagaatttttatgatgtttgttgtactatcttatacgctcctgttggttcgtctgctaatacaatcgaacatttctttagcattaaacgagctaac

SEQ ID NO: 34168 - DNA, 260 bp, Unknown
  Description of Unknown: RightRegion for integrase B8169 sequence
agtattattgataaaatcatcatttcagacagcggagatattgagatagtatttttatgatgtttgttgtactatcttatacgctcctgtgggtgcgttatagttagtacaacattgtgaccgaatcggacacaaaaggcgataagccttgattcctcttgacttaccgcctttttgttttacttcatttcttccaaaaattcctcttctgtctgatattcgcactcggttaataccaatgttgtaaaaaggctttccgt

SEQ ID NO: 34169 - DNA, 260 bp, Unknown
  Description of Unknown: RightRegion for integrase B8170 sequence
agtattattgataaaatcatcatttcagacggtggagatattgagatagtatttttatgatgtttgttgtactatctcatacgctcctgtaggctcatctgccagaatatattttgcatctgttatcaacgccctcgctattgcaactctttgctgctgtccacctgacaattccgtaacctttcgggttatctgactatcatcaagtccaaccagtacaagactgtctctacacattttaatcaattcttttttaggta

SEQ ID NO: 34170 - DNA, 260 bp, Unknown
  Description of Unknown: RightRegion for integrase B8171 sequence
agtattattgataaaatcatcatttcagacggtggagatattgagatagtatttttatgatgtttgttgtactatctcatacgctcctgtaggctcatcagcaagaataagcttcggattagtaataatggctcttgcacttgccactctctgcttctgtccgcctgacatctgataaggatatttgtttaatacatcttcaatgccaagctctcttgcagtctgtcttactcttaattcaatctcccttgccggaacat

SEQ ID NO: 34171 - DNA, 260 bp, Unknown
  Description of Unknown: RightRegion for integrase B8172 sequence
agtattattgataaaatcatcatttcagacggtggagatattgagatagtatttttatgatgtttgttgtactatctcatacgctcctgtcggctcatctgcaaatataatttccggacgattcaccagtgctcttgcaattgctaccctctgctgctgtcctccggataactgatttggcagattataatccggttttcaatccccagagttgcaatgatatcatttacatacgcttcatccacttttcttccatccag

SEQ ID NO: 34172 - DNA, 139 bp, Unknown
  Description of Unknown: RightRegion for integrase B8173 sequence
agtattattgataaaatcatcatttcagacagcggagatattgatatagtatttttataatgtttgttgtactatctcgcacgctcctgtcggctcatctgcaaatataatttccggacgattcaccagtgctcttgca

SEQ ID NO: 34173 - DNA, 260 bp, Unknown
  Description of Unknown: RightRegion for integrase B8174 sequence
agtattattgataaaatcatcatttcagacggtggagatattgagatagtatttttatgatgtttgttgtactatctcatacgctcctgtcggttcatcagctaaaatcagtttcggttcattgattaaggctctagcacaagcacaacgctgtttttgtccgccagaaacttcataaggaaatttcgataaaatatcacgaatacccaatttatcggcgatagcatgaactcttttctcaatatcagtagggttctgtt

SEQ ID NO: 34174 - DNA, 260 bp, Unknown
  Description of Unknown: RightRegion for integrase B8175 sequence
attattaaaaagattgagattaacaatgacggtgaaatcaccggtatttttttcggctaatggtgtactaactgtacactgccggtaggttcatcggccagcacaattgcaggcttagcaaccagagctcttgctattgcaaccctctgctgctgtcctccagagagattattcggcatattctttagtttatcttccagagccagcatatgaaccacctcatccataaacccctgatctaccgtatctccatccaattc

SEQ ID NO: 34175 - DNA, 260 bp, Unknown
  Description of Unknown: RightRegion for integrase B8176 sequence
agtattattgataaaatcatcatttcagacggtggagatattgagatagtatttttatgatgtttgttgtactatctcatacgctcctgtaggctcatcagctagtattattggagcatctgataccaatgctctggcaatagctactctttgctgctgtccaccagataatttcataacatttctttttatttgttttttatctaagcccagttcaaacaagataccttcatctgctgatttattcaccaatctaatat

SEQ ID NO: 34176 - DNA, 260 bp, Unknown
  Description of Unknown: RightRegion for integrase B8177 sequence
gaaatacaggtacctaaaagcgtgaatcgtcatagaaagtataagataatacctttataatttagttttacctcttataagtattaactgacaggaaactggccgggaaaaaccgtgaccaatgcccagggctactgtaagacaagagaacacagctacgtgctggtagatatccccggcacctactccctcatggcccactccacggaggaggaagtggcccgcaacttcatctgctttggcggaagcgacgggattgt

SEQ ID NO: 34177 - DNA, 260 bp, Unknown
  Description of Unknown: RightRegion for integrase B8178 sequence
gtgattaaggaaatccgaataaataaaacaaaagaaatcgttggtattttttttgcgtaaagttgtactaatgttacactgccctcaggtaatgtcgagttagtacaaccaataacaacttaacattttaggcaaaagaaaaaggcaccgagtcgttacgctcgatgccttaaaatagcttttgatgcctttacttttttgtgtaatcaaggcttatccacccagctccggactttaatttgccccacgttgatgctcct

SEQ ID NO: 34178 - DNA, 260 bp, Unknown
  Description of Unknown: RightRegion for integrase B8179 sequence
agtattattgataaaatcatcatttcagacagcggagatattgagatagtatttttatgatgtttgttgtactatcttatacgctcctgtcggttcatcagccaggacgattgcaggctttgacaccaaagcgcgggcaatggctacgcgctgctgctggccgccggaaaggttattgggcatattgttcagcttatcctccagccccagcatctgaacgacttctttcataaacttcttgtctaccttgtttccgtcca

SEQ ID NO: 34179 - DNA, 260 bp, Unknown
  Description of Unknown: RightRegion for integrase B8180 sequence
gaaatacaggtacccaaaagcgtgaatcgccataggaaatataagataatgcctttataattttgttttacctctaatacattgtaaccgacaggaaactggccgggaaaaaccgtgaccaatgcccagggctactgtaagacaagagaacacagctacgtgctggtagatatccccggcacctactccctcatggcccactccacggaggaggaagtggcccgcaacttcatctgctttggcggaagcgacgggattgt

SEQ ID NO: 34180 - DNA, 260 bp, Unknown
  Description of Unknown: RightRegion for integrase B8181 sequence
agtattattgataaaatcatcatttcagacggcggagatattgagatagtttttttatgatgtttgttgtactatcttatacgctcctgttggctcatctgccaaaattaattcgggatttgttattatcgcacgtgccactgctgccctttgcttctgtcctcctgacacctcgtatggatatttattaagcagcttttcaattccaagcaatgaagctataggcgcaagccttttttccatatccctatagtccacac

SEQ ID NO: 34181 - DNA, 260 bp, Unknown
  Description of Unknown: RightRegion for integrase B8182 sequence
aacaccgctacgctctcgtgttcggatatagcgtgttttgaaaacaccattgacatctgaacccccaaggttcggacatcaatggtgtttttcttgtttcctttgatttataagggattcagggcttcaaggagcaatctccttttcggacattcttgataaatcgttgaattttaggccgtaaaacagcgaaaacaatcaatatgaacccctttgttcaggacatggtctctggctccctttgctcgccaaaatagata

SEQ ID NO: 34182 - DNA, 260 bp, Unknown
  Description of Unknown: RightRegion for integrase B8183 sequence
ggcggagaagtgttcgtccgctgcgcgccatgctccaccaaaatgttcggaattttttgatttttgcagaagattccgaacttttttgtatttttcaaaatcaggcactctccacagtcgcaattttgccgccattcggttcgcatcccacacaaagccgtctgaaatcctcaaaggaaacccgaaactcgacttccaaacggtaatcccggtacacatagacggccttgataagttgcgatacgatcatcttctttgct

SEQ ID NO: 34183 - DNA, 260 bp, Unknown
  Description of Unknown: RightRegion for integrase B8184 sequence
gaatatgtaaaacttaaaaacaggcattctattaaaataaacgatatagaattttattaacttacgtacggaagtatagacactctattaatacttaatgtgtatacttccgtaaatttataaagaaagaccacacccattaaggaatagtctttaaaaaatattatatcttttaattgaaaatcaaaaattattttttatcagaaccctattttcccttcatcatcatctacaaatttaacttcatcaatttctgtatt

SEQ ID NO: 34184 - DNA, 260 bp, Unknown
  Description of Unknown: RightRegion for integrase B8185 sequence
gattatgtaaaacttaaaaacaggcactccattgaaataaaagatatagaattttattgatataagtacggaagtatagacactcgattaatatcggatgtataccgactaaaacattaattcatgatggtattgaaggtagttcattcaaagaggctattactagaaaaaaagaagtcgtacaggcattgaataacaagaactatcaaggcttaaattcaaaggacaatatagatgttctaaattataaagctaatttt

SEQ ID NO: 34185 - DNA, 260 bp, Unknown
  Description of Unknown: RightRegion for integrase B8186 sequence
gtgctggatcgcgtaaccgtctccgccgcccgggacatccgatttaccctggcactctgattttttgcaaaaaacgacctggaacccaccgttccaggtcgttttcctcacttcctatttctgtagggtactacttccaaccaatacccatccggatcattgataaaataaacccccatggcctcgttgccgtagcagacacagcccatcttgctgtgcttctcgtaggcggcggggtagtcatctactcggaaggccag

SEQ ID NO: 34186 - DNA, 260 bp, Unknown
  Description of Unknown: RightRegion for integrase B8187 sequence
gtcatcaaggagatccgcctctatccggaccgccatatagagtttgacctaaacctataagctgcgattttttccgcgcaaaataattacacaagatatatccatctgtggaaggactcagatagattttcggcatgggcattctcctttcctggtcattctatgccaaaataccggctctgcgcactggtaatttcccagcatatgtgatacaatagaggctgttgaaaaactcggaagtcttccgccatcggaaagga

SEQ ID NO: 34187 - DNA, 260 bp, Unknown
  Description of Unknown: RightRegion for integrase B8188 sequence
cataagctcttaaagggcataaccgttgaaaagactcacgttacgggtcttattttttaaaagactgctgtaccctctaacgctacatacccaaatggctgtgtatcgttagagggtacacaacccgtttatgataacacgggaaatgatcgatagcaaggagacaatgaaagcaaaatgccctcagctgtatgttcaggctgagggcataacatttactttgtgaagtatttagctactttataaggctttgcgtccgc

SEQ ID NO: 34188 - DNA, 81 bp, Unknown
  Description of Unknown: RightRegion for integrase B8189 sequence
attgaaaaaatcgaagtcgtcggcggtgacatgaatgtctatttttttgacaccaaataaacattggttagtaccaacgta

SEQ ID NO: 34189 - DNA, 260 bp, Unknown
  Description of Unknown: RightRegion for integrase B8190 sequence
tcggggaacaacaccctcactatcgagtgttcggatattgagggcatagctccaccataaggtggcaacaattcggatattttaagcgaaacgcttagaataccaaagggttgccgcctttttttatttcaaattctgcactcagaaaaaaagatattttcacgttattttggtaactggggagattcgaactccccctttcacagattcaaaggtaaaatcctgagaagcgccctttttgcgggcgcagaatagagcga

SEQ ID NO: 34190 - DNA, 260 bp, Unknown
  Description of Unknown: RightRegion for integrase B8191 sequence
gagtatgtagagcttaagaataggcattccattgaaataaaagagatagaattttattaacatatgtacggaagtatagacacttgattaatatttaatgtgtatacttccgtatttttgtttatagaacccgtcgaattcgacgggttttgattatccgtgtcgaaatcgaggcgtttgaaataaaaaaccaccacactcaaaagaatgtggtagcaaaaattataaaggagtaaaaaagattaaattgtatgtaattt

SEQ ID NO: 34191 - DNA, 260 bp, Unknown
  Description of Unknown: RightRegion for integrase B8192 sequence
gagtatataaaacttaagaacagacattccattgaaataaaagatatagaattttattgatataagtacggaagtatagacactcgattaatatcggatgtataccgactaaaacattaattcatgatggtattgaaggtagttcattcaaagaggctattactagaaaaaaagaagtcgtacaggcattgaataacaagaactatcaaggcttaaattcaaaggacaatatagatgttctaaattataaagctaatttt

SEQ ID NO: 34192 - DNA, 109 bp, Unknown
  Description of Unknown: RightRegion for integrase B8193 sequence
gtcatcaaggagatccgcctctatccggaccgccatatagagtttgacctaaacctataagctgcgatttttacgcgcaaaataattacacaagatatatccatctgtg

SEQ ID NO: 34193 - DNA, 260 bp, Unknown
  Description of Unknown: RightRegion for integrase B8194 sequence
aaggaaatctatattgacaaggaaagccgccaaatatgcggttttaaatttctgctctagggtgtagtaacatatattacactgttgagtaataatttttactacacctcatagtgtaattgcttatgcttctctccttgtataaatagcgatttaggtgggtatgagtttgatacgataaacggagtccccagttataaggcaggtgcagatgcagcatgggtcccatttaagcgggagccaataattgaaaaagcttc

SEQ ID NO: 34194 - DNA, 109 bp, Unknown
  Description of Unknown: RightRegion for integrase B8195 sequence
gattatgtaaaacttaagaacaggcattccattgaaataaaagatatagaattttattaacatatgtacggaagtatagacactcgattaatatcggatgtataccgac

SEQ ID NO: 34195 - DNA, 260 bp, Unknown
  Description of Unknown: RightRegion for integrase B8196 sequence
cataagctcttaaagggcataaccgttgaaaagactcacgttacgggtcttattttttaaaagacagctgtaccctctaacgctacatagccaaatggctttgtagcgttagaaggtacaccccaaaacgcgacccgtttatgataacacgggcggagaacgatagcaaggagacaaaatagaagatgccctcagcaatgacagactgctgagggcaaatgtttactttgtgaagtatttagctactttataaggcttag

SEQ ID NO: 34196 - DNA, 260 bp, Unknown
  Description of Unknown: RightRegion for integrase B8197 sequence
attataaaagaaatggttctcgatgataatggacacgttacaagtctttcgtttgtctaaacgtttactaacacactataacccgtttgttctgatagtacatcaagactcatgcccttggaagttcgaattctttttaggttgacagctacattgtgagataggtatgattgataatccataggagactcctttttgcttttattatcagtttcttcatttctgcgtgttctaatgcaagcattattactatccttatg

SEQ ID NO: 34197 - DNA, 260 bp, Unknown
  Description of Unknown: RightRegion for integrase B8198 sequence
cataagctcttaaagggcataaccgttgaaaagactcacgttacgggtcttattttttaaaagacagctgtaccctctaacgctacatatccaaatggctgtgtagcgttagagggtacgcaacccgtttatgataacacgggaaatgaccgatagcaaggagacaaaaatggacgcattaaataagttagatactttagacaggataatcataggtactaaggacaaaatagagcatataatcagctggtacgcgcggg

SEQ ID NO: 34198 - DNA, 260 bp, Unknown
  Description of Unknown: RightRegion for integrase B8199 sequence
aaggaaatttatgtggataaagacagccgccagatatgcggttttatatttatgttatagggtgtagtaacgcatattactgcgtggtgtattattaattactacaccaatcaaatctataaggaggaaaagtatgattttacatgatttgtattatgcttgcggagacatggattgcactcataaagcaatcttaacctttggagatcgaactactttggaaatttccgtaggagaggccgtggatagatatggacatt

SEQ ID NO: 34199 - DNA, 260 bp, Unknown; identical to SEQ ID NO: 34190
  Description of Unknown: RightRegion for integrase B8200 sequence

SEQ ID NO: 34200 - DNA, 260 bp, Unknown
  Description of Unknown: RightRegion for integrase B8201 sequence
attataaaagaaatggttctcgatgataatggacacgttacaagtctttcgtttgtctaaacgtttactaactcactataacccgtttgttcggagaggacgtcaaggctcatgcctttggaggttcggattctttttaggttgacggctacgttgtgggataggtatgattggtaatccatatcgaaagctcctctcttttttattttttattattacactgttttagtctaattttcaatctatttttcatattatac

SEQ ID NO: 34201 - DNA, 260 bp, Unknown
  Description of Unknown: RightRegion for integrase B8202 sequence
gagtatgtaaaaattaaaaacaggcattctattaaaataagcgatatagaattttattaacttatgtacggaagtatagacactcgattaatatttaatgtgtatacttccgtatttttatttatagaacccgtagaattcgtcgagtttagattatccgtgtcgaaatcgaggcgtttgaaattaaaaaacaaccacgcccattaagaacgtggtttagaatatagtattaatttaaaattgggaacaaagattattat

SEQ ID NO: 34202 - DNA, 260 bp, Unknown
  Description of Unknown: RightRegion for integrase B8203 sequence
cataagctcttaaagggcataaccgttgaaaagactcacgttacgggtcttattttttaaaagacagctgtaccctctaacgctacatatccaaatggctgtgtagcgttagagggtacgcaacctgtttatgatagcacgagaaacggtcgatagcaaggagacaaaaatggacgcattaaataagttagatactttagacaggataatcataggtactaaggacaaaatagagcatatagttagttggtacgcaaggg

SEQ ID NO: 34203 - DNA, 260 bp, Unknown
  Description of Unknown: RightRegion for integrase B8204 sequence
cataagctcttaaagggcataaccgttgaaaagactcacgttacaggtcttattttttaaagatacttttataccctctaacgctacatacccaaatggctgtgtagcgttagagggtacgcaacccgtttatgataacacgggaaatgaccgatagcaaggagacaaaaaatggacacattaaataagttagatactttagacaggataatcataggtactaaggacaaaatagagcatataatcagctggtacgcgcg

SEQ ID NO: 34204 - DNA, 260 bp, Unknown
  Description of Unknown: RightRegion for integrase B8205 sequence
cataagctcttaaagggcataaccgttgaaaagactcacgttacgggtcttattttttaaaagacagctgtaccttctaacgctacatatccaaatggctgtgtatcgttagagggtacgcaacccgtttatgataacacgggaaatgaccgatagcaaggagacaaaaatggacgcattaaataagttagatactttagacaggataatcgtaggtactaaggaaaaaatagaacatataatcagctggtacgcgcggg

SEQ ID NO: 34205 - DNA, 260 bp, Unknown
  Description of Unknown: RightRegion for integrase B8206 sequence
acacaattaattgaacggattaccatcacggatgaagatatcgaaattactttaaaataaattgcagatttacaaatcccatgcacatgggctttgtaaatttgtaatagaaaattaccccggagttttgacgccccggggccttgatgatgctgttatgataatcccagcaacttgctccaagtctttggtccaacgatgccatccacaacaagccccatcgcccgctgaaatgccataattgccgcttttgtctttac

SEQ ID NO: 34206 - DNA, 260 bp, Unknown
  Description of Unknown: RightRegion for integrase B8207 sequence
aaggaaatctatgtggataaagatagccgtcagatatgcggttttaaatttttgctctagggtgtagtaacatatattactgcgtagaatttgaaccacatgccaccgccctggaagccaaaggcgacggttacgtggtagcatctctgggcgaggattccggatatgtcccttacaccgctttttccgcgaaaaagggctatattgaggcgcatcccgacgtaatccagtccttcaccaacgccctccagaagggtatg

SEQ ID NO: 34207 - DNA, 260 bp, Unknown
  Description of Unknown: RightRegion for integrase B8208 sequence
gtcatcaaggagatccgcctctatccggaccgccatatagagtttgacctaaacctataagctgcgattttttccgcgcaaaataattacacaagatatatccatctgtagatgggtatatcttgtgtaacttttcggcacgaccaaggccccggggaactccccggggccttgctattacttcttccccttcaccacaaacccggtgaaccccgccgctttcagcttttccagcatcctgtcggcgttggcgcggacgg

SEQ ID NO: 34208 - DNA, 260 bp, Unknown
  Description of Unknown: RightRegion for integrase B8209 sequence
gattatgtaaaacttaaaaacaggcattctattaaaataaacgatatagaattttattaacttatgtacggaagtatagacacttgattaatatcggatgtataccgactaaaacattaattcatgatggtattgaaggtagttcattcaaagaggctattactagaaaaaaagaagtcgtacaggcattgaataacaagaactatcaaggcttaaattcaaaggacaatatagatgttctaaattataaagctaatttt

SEQ ID NO: 34209 - DNA, 260 bp, Unknown
  Description of Unknown: RightRegion for integrase B8210 sequence
acgttgataaagagaatatatataaacggcaatagagttgaacatgttgagtttaattaatgcctgttgaataagacatataagatatattacccacctaaacggtgggtttcgttttgccaatgatgtgtatggcttaacacaccctcttctgtcgatggggtacggtaaagccatacatatgaaacccgcgccacataagggttttgataaaccaggatgtataattgttatctacacattggcatttagactaatta

SEQ ID NO: 34210 - DNA, 260 bp, Unknown
  Description of Unknown: RightRegion for integrase B8211 sequence
gattatgtaaaacttaaaaacaggcattctatcaaaataaatgatatagaattttattaacttatgtacggaagtatagacactcgattaatatttaatgtgtatacttccgtaaaaataaccacgctcataaagaacgtggtagcaaaatttataaaggagtaaaaaagattaaattgtatgtaatttaattgtagcacagaccgtgtaaccaatgtagtgttaaactatgtttttttaatatcaatctatcatctaca

SEQ ID NO: 34211 - DNA, 260 bp, Unknown
  Description of Unknown: RightRegion for integrase B8212 sequence
attataaaagaaatggttctcgatgataatggacacgttacaagtctttcgtttgtctaaacgtttactaacacactataacccgtttgttctgatagtacatcaagactcatgcccttggaagttcgaattctttttaggttgacagctacattgtgagataggtatgattgataatccatagaagactcctttttgcttttattatcagtttcttcatttctgcgtgttctaatgcaagtattattactatccttatg

SEQ ID NO: 34212 - DNA, 260 bp, Unknown
  Description of Unknown: RightRegion for integrase B8213 sequence
gattatgtaaaacttaaaaacaggcattctattaaaataaacgatatagaattttattaacttatgtacggaagtatagacactctattaatatttaatgtgtatacttccgtaaaaaataaccacgctcaaatgaacgtggtttagaatatagtattaatttgaaatagggaacaaagattattatacaataaaaaagagggtagccatagtgactacccttgtataatgacgtggtaacttaattatatcaaactgca

SEQ ID NO: 34213 - DNA, 260 bp, Unknown
  Description of Unknown: RightRegion for integrase B8214 sequence
gattatgtaaaacttaaaaacaggcattctattaaaataaacgatatagaattttattaacttatgtacggaagtatagacactcgattaatatttaatgtgtatacttccgtaaaaaaaccacgctcataagaacgtggttgctttttgtttattcaattacgccgattgctttagcacattctttaaatgtgtcataaccttttaaaacaactttgatatagtcttttgcatcttgctcattttcaaagaatatactt

SEQ ID NO: 34214 - DNA, 260 bp, Unknown
  Description of Unknown: RightRegion for integrase B8215 sequence
aaatatgtaaaacttaaaaataggcattctattaaaataagcgatatagaattttattaacttatgtacggaagtatagacactcgattaatatcggatgtataccgactaaaacattaattcatgatggtattgaaggtagttcattcaaagaggctattactagaaaaaaagaagtcgtacaggcattgaataacaagaactatcaaggcttaaattcaaaggacaatatagatgttctaaattataaagctaatttt

SEQ ID NO: 34215 - DNA, 260 bp, Unknown; identical to SEQ ID NO: 34203
  Description of Unknown: RightRegion for integrase B8216 sequence

SEQ ID NO: 34216 - DNA, 109 bp, Unknown
  Description of Unknown: RightRegion for integrase B8217 sequence
gagtatgcaaagcttaagaacagacattccattgaaataaaagatatagaattttattgatataagtacggaagtatagacactcgattaatatcggatgtataccgac

SEQ ID NO: 34217 - DNA, 260 bp, Unknown
  Description of Unknown: RightRegion for integrase B8218 sequence
aaactgattaaggagataaagcttgatggtaagcagattaagagggtcatatttttttaagtaatcgtcaggtgtatctggacgttatcaactgacggcgtccggttacaccggaaaaaataaaaggaggtgtgtgaagtgaagacttacaagtttaagaacgctactattaatgttatcggtgaggtaaaccgagaatgtttggagaaggcgacgatagaattggtgaaagctgctaggaaagcaaaagagaagaaaga

SEQ ID NO: 34218 - DNA, 260 bp, Unknown
  Description of Unknown: RightRegion for integrase B8219 sequence
cataagctcttaaagggcataaccgttgaaaagactcacgttacgggtcttattttttaaaagactgctgtaccctctaacgctacatacccaaatggctgtgtatcgttagagggtacgcaacccgtttatgataacacgggaaatgatcgatagcaaggagacaatgaaagcaaaatgccctcagccggaacatacagctgagggcacgatatttactttgtgaagtatttagctactttataaggctttgcgtccgc

SEQ ID NO: 34219 - DNA, 260 bp, Unknown
  Description of Unknown: RightRegion for integrase B8220 sequence
gagtatgtaaagcttaaaaacaggcattctattaaaataaacgatatagaattttattaacgtgtgtacggaagtatagacactcgattaatatcggatgtataccgactaaaacattaattcatgatggtattgaaggtagttcattcaaagaggctattactagaaaaaaagaagtcgtacaggcattgaataacaagaactatcaaggcttaaattcaaaggacaatatagatgttctaaattataaagctaatttt

SEQ ID NO: 34220 - DNA, 260 bp, Unknown
  Description of Unknown: RightRegion for integrase B8221 sequence
aaggaaatctatgtggataaagatagccgtcagatatgcggttttaaatttttgctctagggtgtagtaacatatattactgcgtagaatttgaaccacatgccaccgccctggaagccaaaggcgatggttacgtggtagcatctctgggcgaggattccggatatgtcccttacacggctttttccgcgaaaaagggctatattgaggcgcatcccgacgtaatccagtccttcaccaacgccctccagaagggtatg

SEQ ID NO: 34221 - DNA, 260 bp, Unknown
  Description of Unknown: RightRegion for integrase B8222 sequence
gagtatgtaaagcttaaaaacaggcattctattaaaataaacgatatagaattttattaacgtgtgtacggaagtatagacactcgattaatatcggatgtatacctactaaaacattaattcatgatggtattgaaggtaattcattcaaagagtctattactagaaaaaaagaagtcgtacaagcattgaataacaagaactatcaaggcttaaattcaaagaacaatatagatgttctaaattataacgccaaattt

SEQ ID NO: 34222 - DNA, 260 bp, Unknown
  Description of Unknown: RightRegion for integrase B8223 sequence
attataaaagaaatggttctcgatgataatggacacgttacaagtctttcgtttgtctaaacgtttactaagttattataacccgtttgttctgatagtacatcaagactcatgcccttggaagttcgaattctttttaggttgacagctacattgtgagataggtatgattgataatccatagaagactcctttttgcttttattatcagtttcttcatttctgcgtgttctaatgcaagtattattactattcttatg

SEQ ID NO: 34223 - DNA, 149 bp, Unknown
  Description of Unknown: RightRegion for integrase B8224 sequence
aataaaacagtcaacagtcctaacgaggttaagattaaagatgtttcatttttattgtagtgtgtggtattagcattttgattgtgatttaacatacaaaaccacacaaaaaaagcccacctaacttaataggtgggtcttgttatgta

SEQ ID NO: 34224 - DNA, 109 bp, Unknown
  Description of Unknown: RightRegion for integrase B8225 sequence
attattgataaaattattataggtaataatcgtaatgatataacaattcattttttataattattagttatattatttatatatatccagtaggtccatttactataac

SEQ ID NO: 34225 - DNA, 260 bp, Unknown
  Description of Unknown: RightRegion for integrase B8226 sequence
gagtatgtagagcttaagaataggcattccattgaaataaaagagatagaattttattaacatatgtacggaagtatagacacttgattaatatcggatgtataccgactaaaacattaattcatgatggtattgaaggtagttcattcaaagaggctattactagaaaaaaagaagtcgtacaggcattgaataacaagaactatcaaggcttaaattcaaaggacaatatagatgttctaaattataaagctaatttt

SEQ ID NO: 34226 - DNA, 260 bp, Unknown
  Description of Unknown: RightRegion for integrase B8227 sequence
cataagctcttaaagggcataaccgttgaaaagactcacgttacgggtcttattttttaaaagacagctgtaccctctaacgctacatatccaaatggctgtgtatcgttagagggtacgcaacccgtttatgataacacgggaaatgaccgatagcaaggagacaaaaatggacgcattaaataagttagatactttagacaggataatcgtaggtactaaggaaaaaatagaacatataatcagctggtacgcgcggg

SEQ ID NO: 34227 - DNA, 260 bp, Unknown
  Description of Unknown: RightRegion for integrase B8228 sequence
gtcatatcggaaattcgtgttgaccgtgataataacatcacgggaattatttttgggtagtgttgtactaatgcgacactacctgtcggttcgtccgccaggatgatcttcggttctgtgatcagtgctcttgcgattgctgcacgctgtttctgaccgccggacacttcatacggatatttctccagaagcttttcaatggacagtctgcgtgaaagttccatcattttcggtgccatttcactgtaagtctttccgga

SEQ ID NO: 34228 - DNA, 260 bp, Unknown; identical to SEQ ID NO: 34226
  Description of Unknown: RightRegion for integrase B8229 sequence

SEQ ID NO: 34229 - DNA, 260 bp, Unknown
  Description of Unknown: RightRegion for integrase B8230 sequence
gagtatataaatcttaagaacaggcattccattgaaataaaagatatagaattttattaacatatgtacggaagtatagacactcgattaatatttaatgtgcatacttccgtaaaaaataaccaccctcaaaagaatgtggtttagaatatagtatcaatttaaaatcgggaacatagattattataacaaaaaaagagccactcctcatcatagagcacttataaaaataagcaccgtaatgaagaatgactatacag

SEQ ID NO: 34230 - DNA, 94 bp, Unknown
  Description of Unknown: RightRegion for integrase B8231 sequence
gattatgtaaaacttaaaaacaggcattctatcaaaataaacgatatagaattttattaacttatgtacggaagtatagacactcaattaatat

SEQ ID NO: 34231 - DNA, 260 bp, Unknown
  Description of Unknown: RightRegion for integrase B8232 sequence
gtcatatcggaaattcgtgttgaccgtgataataacatcacgggaattatttttgggtagtgttgtactaatgcgacactacctgtgggctcatcagcaagaatcagcttcgggtctgtgatcagagctctggcaaccgctgcacgctgtttctgtccaccggaaacttcataaggatatttatccagaagttctgtgatacacagtgcctgtgcaatcgggcggatcttctgttccatttctcggtaatcttcgccggc

SEQ ID NO: 34232 - DNA, 260 bp, Unknown
  Description of Unknown: RightRegion for integrase B8233 sequence
gaagaaatcctggtggatccagaaaccaggcagataaaagatgtgaaattattgttataaatgcaagggcagtattctatattacaccgtcgagtttgagcccttcgccactgccctggagcaggaaggaaacggctatgtagtcgcatccctcggaaaagattccggctatgtgccctacacggcctacagtgccaagaagagctatatcgaaaagcacccggagatcatccagaaattcacaaacgcgatccagaaag

SEQ ID NO: 34233 - DNA, 260 bp, Unknown
  Description of Unknown: RightRegion for integrase B8234 sequence
gtcatatcagaaattcgtgttgaccgtgataataacatcacgggaattatttttgggtagtgttgtactaatgcaacactacctgtaggttatgtataattagtacaaataacaccactcggcagacctgaatttgtcgggtggtgttttctagctttttttgcttcattcgtaaattaccgcaaatatgcggctatttttaattcatttgtgtgtaaagttcttctattttctcctttagttcctgtatgtcacctctg

SEQ ID NO: 34234 - DNA, 260 bp, Unknown
  Description of Unknown: RightRegion for integrase B8235 sequence
ctgattgatcggattgtcatagatgatgataatgtcaacatcattctccacaagatatagtatgcagatattcaaagtccatgtgcatgggcttcggctgcaacgcggcgggcatcgtgggctgccggatcatcgactcgcccagggaacggctgatcgccatggtcaccaacaactttgtgccctgcaacggccggttccccaccctgatcgccattatctccatgtttttcgtgggcgtggcggggggcgccggaaat

SEQ ID NO: 34235 - DNA, 260 bp, Unknown
  Description of Unknown: RightRegion for integrase B8236 sequence
ataattgacaagataataattgtcaatggagatattgaaatacaattaaagaatttttagcacatactacacgccatgcctacggcagtatgttagtgctaatgccgtatttatcgtacttttacaactaaataaaatttaaatgtcgctttttggtcgttaaactgtcgtttttctgtcgctttaagcggctttttttgtgtgaaaataaaattacgaaaaggagagtgattgaattgtacgatgaagatttaagagag

SEQ ID NO: 34236 - DNA, 84 bp, Unknown
  Description of Unknown: RightRegion for integrase B8237 sequence
ataattgacaagataataattgtcaatggagatattgagatacaattaaagaatttttagcacatactacacgccatgccgatg

SEQ ID NO: 34237 - DNA, 260 bp, Unknown
  Description of Unknown: RightRegion for integrase B8238 sequence
gaagaaatcctggtggatccagaaaccaggcagataaaagatgtgaaattattgttataaatgcaagggcagtattctatattacacggtcgagtttgagccattcgcgaccgccctggagcaggagggaaacggctatgtcgtcgcctccctcggaaaagactccggctacgttccctacaccgcctacagcgcaaaaaagagctatctcgaaaaacatccggagctcatccagaaattcacaaacgcgatccagcgcg

SEQ ID NO: 34238 - DNA, 260 bp, Unknown
  Description of Unknown: RightRegion for integrase B8239 sequence
ataattgacaagataataattgtcaatggagatattgagatacaattaaagaatttttagcacatactacacaccatgccgatggcagtatgttagtgctaataccgtatttatcgtacttttacaactaaataaaatctaactgtcgcttttatgtcgtaaaactgtcgtttttatgtcgtgttcagcggctttttttgtgtgaaaataaaattacaaaaggagagtgattgaattgtatgacgaagatttaagagagc

SEQ ID NO: 34239 - DNA, 109 bp, Unknown
  Description of Unknown: RightRegion for integrase B8240 sequence
ataatcgaaaaaataacacccacagaagatagaaatatctttaatatttttttaaaataatgtatgtacttattaaacccaaccaattgacaaagcacctctataattt

SEQ ID NO: 34240 - DNA, 260 bp, Unknown
  Description of Unknown: RightRegion for integrase B8241 sequence
gaagaaatcctggtggatccagaaaccaggcagataaaagatgtgaaattattgttataaatgcaagggcagtattctatattacaccgtcgagttcgaacccttcgcgacagccctggaacaggaaggaaacggctatgtagtcgcatcccttggaaaagattccggctacgtcccttacacggcctacagtgcaaaaaaaagctatattgaaaagcatccggagatcatccggaaattcacaaacgcgatccagaaag

SEQ ID NO: 34241 - DNA, 260 bp, Unknown
  Description of Unknown: RightRegion for integrase B8242 sequence
ataattgacaagataataattgtcaatggagatattgaaatacaattaaagaatttttagtacatactacacgccatgcctacggcagtatattagtgctaatgccgtatttatcgtacttttacaactaaataaaatctaaatgtcgcttttatgtcgtaaaactgtcgtttttatgtcgtgttcagcggctttttttgtgtgaaaataaaattacaaaaaggagagtgattgaattgtatgacgaagatttaagagag

SEQ ID NO: 34242 - DNA, 136 bp, Unknown
  Description of Unknown: RightRegion for integrase B8243 sequence
gtcatatcagaaattcgtgttgaccgtgataataacatcacgggaattatttttgggtagtgttgtactaatgcgacactacctgtcggctcatctgcaaatataatttccggacgattcaccagtgctcttgcaa

SEQ ID NO: 34243 - DNA, 260 bp, Unknown
  Description of Unknown: RightRegion for integrase B8244 sequence
gtcatatcggaaattcgtgttgaccgtgataataacatcacgggaattatttttgggtagtgttgtactaatgcgacactacctgtaggctgtgttatattagtacaaaagaaatgaccccagcaaggctactgcctgccggggttttcttctcttattatcattcttacagttttattacacttcttacatttctgcactggtcttgttttcgcttctccaaacggtttgcagtaccccgttttgcacaccgggcatat

SEQ ID NO: 34244 - DNA, 260 bp, Unknown
  Description of Unknown: RightRegion for integrase B8245 sequence
ataattgacaagataataattgtcaatggagatattgagatacaattaaagaatttttagcacatactacacgccatgcctatggcagtatgttagtgctaataccgtatttatcgtacttttacaactaaataaaatctaactgtcgcttttatgtcgtaaaactgtcgtttttatgtcgtgttcagcggctttttttgtgtgaaaataaaattacaaaaggagagtgattgaattgtatgacgaagatttaagagagc

SEQ ID NO: 34245 - DNA, 84 bp, Unknown; identical to SEQ ID NO: 34236
  Description of Unknown: RightRegion for integrase B8246 sequence

SEQ ID NO: 34246 - DNA, 260 bp, Unknown
  Description of Unknown: RightRegion for integrase B8247 sequence
gaagaaatcctggtggatccagaaaccaggcagataaaagatgtgaaattattgttataaatgcaagggcagtattctatattacaccgttgaattcgaaccattcgccacagccctggagcaggaaggaaacggctatgtggtcgcgtctctcggaaaagactccggatatgtgccctacaccgcctacagcgctaagaaaagctatatcgaaaagcacccggagatcatccagaaattcacaaacgcgatccagaaag

SEQ ID NO: 34247 - DNA, 260 bp, Unknown
  Description of Unknown: RightRegion for integrase B8248 sequence
gttttaaaagaagtcgtgatcgatcgcgatcttaacattgttagtgtttcgttcgcttagttgtttactaactcactatagcctgtcggttcatcacaaagaagcagttttggattcttgatcaatgcccttgcgattgcacaacgctgctgctgtccacccgataattgtgctggaaatttatcttgatgttctgtcaatccgagcgtgtctaacaattcatccatatctaatggatcttccgttaaaaactgacagat

SEQ ID NO: 34248 - DNA, 130 bp, Unknown
  Description of Unknown: RightRegion for integrase B8249 sequence
gtcatatcggaaattcgtgttgaccgtgataataacatcacgggaattatttttgggtagtgttgtactaatgcgacactacctgtcggctcatctgcaaatataatttccggacgattcaccagtgctc

SEQ ID NO: 34249 - DNA, 260 bp, Unknown
  Description of Unknown: RightRegion for integrase B8250 sequence
attataaacgatattagattagtgaatgattacagattctatataaacttaaaaatataatggagggatcctctatgtctataatcaaagaaaaaatattaaagttttatgctatagatgaactaaaatatttatgcagtaatcatattttcttttatttaactagaaatcatataaaaaatattccaaaactttgtgaatttgctaaatttttagatataaaaactttttatacaacagatgatttcgtaatagattac

SEQ ID NO: 34250 - DNA, 109 bp, Unknown
  Description of Unknown: RightRegion for integrase B8251 sequence
gacttggaacattttacggtgagctttttggatggaacggaaaaagaaatattagtataatgtaaataatatgccacatagcctttgggggttgtgtgacgtttttttg

SEQ ID NO: 34251 - DNA, 260 bp, Unknown
  Description of Unknown: RightRegion for integrase B8252 sequence
gttttaaaagaagtcgtgatcgatcgcgatcttaacattgttagtgtttcgttcgcttagctgtttactaactcgctatagcctgtcggttcgtcgcaaagaagcagctttggattcttgatcaacgcccttgcaattgcacatcgctgctgctgtccaccggataattgtgcaggaaatttatcttgatgttctgttagtccgagcgtatctagcagttcttccatatccaatggatcttccgttaaaaattgacagat

SEQ ID NO: 34252 - DNA, 260 bp, Unknown
  Description of Unknown: RightRegion for integrase B8253 sequence
gaagaaatcctggtggatccagaaaccaggcagataaaagatgtgaaattattattataaatgcaagggcagtattctatattacaccgtcgagttcgaacccttcgccacagccctggagcaggaaggaaacggctatgtagtcgcatccctcggaaaagattccggctatgtgccctacacggcctacagtgccaagaagagctatatcgaaaagcacccggagatcatccagaaattcacaaacgcgatccagaaag

SEQ ID NO: 34253 - DNA, 260 bp, Unknown
  Description of Unknown: RightRegion for integrase B8254 sequence
gaagaaatcctggtggatccagaaaccaggcagataaaagatgtgaaattattgttataaatgcaagggcagtattctatattacaccgtcgagtttgagcccttcgccacagccctggagcaggaaggaaacggctatgtagtcgcgtccctcggaaaagactccggctacgtcccttacacggcctacagtgcaaaaaaaagctatattgaaaagcatccggagatcatccggaaattcacaaatgcgattcagaaag

SEQ ID NO: 34254 - DNA, 260 bp, Unknown
  Description of Unknown: RightRegion for integrase B8255 sequence
gaagaaatcctggtggatccagaaaccaggcagataaaagatgtgaaattattgttataaatgcaagggcagtattctatattacaccgtcgagttcgaacccttcgccactgccctggagcaggaaggaaacggctatgtagtcgcatccctcggaaaagattccggctatgtgccctacacggcctacagtgccaagaagagctatatcgaaaagcacccggagatcatccagaaattcacaaacgcgatccagaaag

SEQ ID NO: 34255 - DNA, 260 bp, Unknown
  Description of Unknown: RightRegion for integrase B8256 sequence
ataattgacaagataataattgtcaatggagatattgagatacaattaaagaatttttagcacatactacacgccatgccgatgataatgggcgagataaagaggtttttgcgggatgatgggatgattaaggtcagcaggacattgcgggaaaatggctggaagataaaaaaagcggcagaaaagataagctatgaaaaaggcagaaatgcaaagataagtgagattgctgctgcaacggagataacggaggaggatat

SEQ ID NO: 34256 - DNA, 260 bp, Unknown
  Description of Unknown: RightRegion for integrase B8257 sequence
gcttcattagtcgagtgtatagaagtttcagaaacaagccataatctcattttcaagtagttgtattatttttggttatcaccactagaccaaaaataatacaaataatatttcttttgactttcatatagtattatgatatattaattataaggttagcaagtagtttgtcatctacttgtttacttcgtttcgttaaaaaggacttctagaggtgggagttctttttttttatgctctaaaatagaaaaacacccgta

SEQ ID NO: 34257 - DNA, 260 bp, Unknown
  Description of Unknown: RightRegion for integrase B8258 sequence
atcattcaggagattcatgtgaacgaagaccatgccataacctccgtcgattttctgtgatgcgtcttgtactaactatactgttccattcggagttagccagttaatacaagacgattttgattatcctacatatgtctttccaccatatcttgcagcaatccagcctgatggaatctgcatccagatatcattgctgatcatcttacattccaagcaaaactctccatgtgttctgtccaacaatgccgtctggtgta

SEQ ID NO: 34258 - DNA, 260 bp, Unknown
  Description of Unknown: RightRegion for integrase B8259 sequence
ataattgacaagataataattgtcaatggagatattgagatacaattaaagaatttttagcacatactacacgccatgccgatggcagtatgttagtgctaataccgtatttatcgtacttttacaactaaataaaatctaactgtcgcttttatgtcgtaaaactgtcgtttttatgtcgtgttcagcggctttttttgtgtgaaaataaaattacaaaaggagagtgattgaattgtatgacgaagatttaagagagc

SEQ ID NO: 34259 - DNA, 260 bp, Unknown
  Description of Unknown: RightRegion for integrase B8260 sequence
gtattgagagaaataagagtagataatgaccggaatatcacgggcatttcatttttttgatctttgttgtactaactttgcattgcccgtgggttgtgtatagttagtacaatatttgaaaaagccctaaaatccaacgtttttaggggtttaatttaatgctgatctatacattttgacgtgcttctctgactaaatttcgattaaattcaatctttacgcctttatttccggaggttaaaacacaagccggtgttcca

SEQ ID NO: 34260 - DNA, 260 bp, Unknown
  Description of Unknown: RightRegion for integrase B8261 sequence
gttttaaaagaagtcgtgatcgatcgcgatcttaatattgttagcgtttcgttcgcttagctgtttactaactcactatatcctgtcggttatagtgtgttagtaaacaaaaatatttttgataaaaccagggcggtatttgtgactgctgccctggttttatttcttgtttaataaaaataattaattaaatatgtcttccctttatactcaaccactccccaatttgtaattggttcgtttgtttctaacatcttttt

SEQ ID NO: 34261 - DNA, 260 bp, Unknown
  Description of Unknown: RightRegion for integrase B8262 sequence
gtcattaaagaaataaggattgacaatgaccagaatatcacgggtgttgtttttgggtagtgttgtactaattgaacactacccgtcggctcatctgcaagtattatctgcggctgtgtaattaatgctcttgccaccgctgccctttgcttttgtccgcctgatacctcataaggatatttatccagaagctgtgttataccaagctttgctgcaagcggctttaagcgttcttccatctcattatatttctttccggc

SEQ ID NO: 34262 - DNA, 260 bp, Unknown
  Description of Unknown: RightRegion for integrase B8263 sequence
aaaattattgataaaatatatattgaaaatggaaaaattaaagagattactttttcgtaatctctttaatgtataatcccttgtatttctaatatttctttgtttggtaattagtcgttcgtttcaactggtgcctcaactgggcaaactcctgcacaagtaccacaagatatacatgctgatgcatctataacaaatttatcttcaccttgtgaaatacatcctaccggacattctgcagcacaagctccacaagatat

SEQ ID NO: 34263 - DNA, 260 bp, Unknown
  Description of Unknown: RightRegion for integrase B8264 sequence
gtcattaaagaaataaggattgacaatgaccagaatatcacgggtgttgtttttgggtagtgttgtactaattgaacactacctgtaggctcgtcgcagagcagtatatccggatttttcacgattgcacgaccgattgacacacgctgctgctgtccgccggatagctgatttggaagcttatagcggtgctcgtaaagccccagcgtgtgaagcagctcatcgatatccagcgcattgtctgacaggtatgcgcccac

SEQ ID NO: 34264 - DNA, 260 bp, Unknown
  Description of Unknown: RightRegion for integrase B8265 sequence
gtcattaaagaaataagaattgacaatgaccagaatatcacgggtgttgtttttgggtagtgttgtactaattgaacactacccgtaggttcatcagcaagaatcagctttggattagtgataatcgctctagcacttgcaactctctgcttctgtccacctgacatctgatacggatatttatttaacacttcataaattccaagttcatttgcaacttttttcacacgtctgtcaatttcaccggcttttatattctg

SEQ ID NO: 34265 - DNA, 138 bp, Unknown
  Description of Unknown: RightRegion for integrase B8266 sequence
gtcattaaagaaataaggattgacaatgaccagaatatcacgggtgttgtttttgggtagtgttgtactaattgaacactacccgttggctcatcagccaaaattaattcgggatttgttattatcgcacgtgccact

SEQ ID NO: 34266 - DNA, 83 bp, Unknown
  Description of Unknown: RightRegion for integrase B8267 sequence
gtcattaaagaaataaggattgacaatgaccagaatatcacgggtgttgtttttgggtagtgttgtactaattgaacactacc

SEQ ID NO: 34267 - DNA, 85 bp, Unknown
  Description of Unknown: RightRegion for integrase B8268 sequence
gtcattaaggaaataaagattgataatgaccagaatatcacgggtgttgtttttgggtagtgttgtactaattgaacactacccg

SEQ ID NO: 34268 - DNA, 260 bp, Unknown
  Description of Unknown: RightRegion for integrase B8269 sequence
gtcattaaagaaataaggattgacaatgaccagaatatcacgggtgttgtttttgggtagtgttgtactaattgaacactacccgtcgggtatatacatcaaagatatcctcgataatcaaaccgttcttggcgtgtttggtcgtattcttggtaattccgagattcttcaacgtctggatatcacggctgacgtctgcattcgtttttgctatctcgtttttatcgaccacgatcggaaaataattctgggcattaaac

SEQ ID NO: 34269 - DNA, 260 bp, Unknown
  Description of Unknown: RightRegion for integrase B8270 sequence
gtcattaaagaaataagaattgacaatgaccagaatatcacgggtgttgtttttgggtagtgttgtactaattgaacactacccgttggctcatcagccaaaattaattcgggatttgttattatcgcacgtgccactgctgccctttgcttctgtcctcctgacacctcgtatggatatttattaagcagcttttcaattccaagcagtgaagctataggtgcaagccttttttccatatccctatagtccacacctga

SEQ ID NO: 34270 - DNA, 260 bp, Unknown
  Description of Unknown: RightRegion for integrase B8271 sequence
gtcattaaagaaataaggattgacaatgaccagaatatcacgggtgttgtttttgggtagtgttgtactaattgaacactacccgtcggttcatcagcaaatattatctgcggattagttataagtgcccttgctactgctgctctttgcttctgtccaccagatacctcatatggatatttatccagaagctgttctataccaagtcttttagaaagcggctttaccctttcttccatctcgttatattttttccctga

SEQ ID NO: 34271 - DNA, 260 bp, Unknown
  Description of Unknown: RightRegion for integrase B8272 sequence
tcctgcatcagggaaatccgggtggatcacgataaaaacattgatattgtatttttataacctgaaatcgtatacagttttttacatataaccattcgggttattgctctgccatctccaggaatcctcgcacatttcacggatgccgttctctgcagtccagccaagctctctggctgccttggaagcatcgcagtagcaggttgcaatatcaccggcacgacgtggtttgatcacatatggaatcttcacgcctgttg

SEQ ID NO: 34272 - DNA, 260 bp, Unknown
  Description of Unknown: RightRegion for integrase B8273 sequence
gtcattaaagaaataaggattgacaatgaccagaatatcacgggtgttgtttttgggtagtgttgtactaattgaacactacccgtcggttcatcggcaaggatcatttggggatgtaagatcagagcccttgctgccgcaacacgctgacgttgaccgccggacatcttggacggaaacttatccagaacatcagaaatttccagatagtcagccaactgcttcagccgctggctgctttctgtttcggctaccccatg

SEQ ID NO: 34273 - DNA, 135 bp, Unknown
  Description of Unknown: RightRegion for integrase B8274 sequence
gtcattaaagaaataaggattgacaatgaccagaatatcacgggtgttgtttttgggtagtgttgtactaattgaacactacccgtcggttcatcagctaaaatcagtttcggttcattgattaaggctctagca

SEQ ID NO: 34274 - DNA, 186 bp, Unknown
  Description of Unknown: RightRegion for integrase B8275 sequence
gtcattaaagaaataagaattgacaatgaccagaatatcacgggtgttgtttttgggtagtgttgtactaatttaacactacccgtcggttcatcagctaaaatcagtttcggttcattgattaaggctctagcacaagcacaacgctgtttttgtccgccagaaacttcataaggaaatttcgat

SEQ ID NO: 34275 - DNA, 260 bp, Unknown
  Description of Unknown: RightRegion for integrase B8276 sequence
gtcattaaagaaataagaattgacaatgaccagaatatcacgggtgttgtttttgggtagtgttgtactaatgctacactacccgtcggctcatccgcgagcactatagatggtctcgtaatcagggctcttcctatagatgtgcgctgctgctgtccacctgagagctcatttggcagatgagtacgtctctctgtaagtccaaggcgcaaaagcatgtcatccatctgtgctttttccacctttcttccatcaagctc

SEQ ID NO: 34276 - DNA, 260 bp, Unknown
  Description of Unknown: RightRegion for integrase B8277 sequence
gtcattaaagaaataagaattgacaatgaccagaatatcacgggtgttgtttttgggtagtgttgtactaattgaacactacctgtcggctcatcggcaagcaccagacttggacttgttataattgcccttgcagaagcaactctctgtttctgtccacctgacatctggtaaggatatttatttaatatctctgttatatcaagctgttctgctacattttttactgccctgtcaattacatcagcagaatcatttct

SEQ ID NO: 34277 - DNA, 109 bp, Unknown
  Description of Unknown: RightRegion for integrase B8278 sequence
gtcattaaagaaataaggattgacaatgaccagaatatcacgggtgttgtttttgtgtagtgttgtactaattgaacactacccgtaggctcatcagctagtattattg

SEQ ID NO: 34278 - DNA, 135 bp, Unknown
  Description of Unknown: RightRegion for integrase B8279 sequence
gtcattaaagaaataaggattgacaatgaccagaatatcacgggtgttgtttttgggtagtgttgtactaattgaacactacccgtcggttcatcggcaaggatcatttggggatgtaagatcagagcccttgct

SEQ ID NO: 34279 - DNA, 260 bp, Unknown
  Description of Unknown: RightRegion for integrase B8280 sequence
gtcattaaagaaataagaattgacaatgaccagaatatcacgggtgttgtttttgggtagtgttgtactaattgaacactacccgtgggctgtgttaagttagtacaaaataaagacccccagcaaggctgctgcctgccggggtcttattttacagtccatttcctttgaacattgcccacccaccttttgaaaacgggttgtttttatcttttggaaagtcctttagatattgcttgaataaacttgctcttatatgt

SEQ ID NO: 34280 - DNA, 151 bp, Unknown
  Description of Unknown: RightRegion for integrase B8281 sequence
gtcattaaagaaataggaattgacaatgaccagaatatcacgggtgttgtttttgggtagtgttgtactaattgaacactacccgttggctcatcagccaaaattaattcgggatttgttattatcgcacgtgccactgctgccctttgct

SEQ ID NO: 34281 - DNA, 260 bp, Unknown
  Description of Unknown: RightRegion for integrase B8282 sequence
gtcattaaagaaataagaattgacaatgaccagaatatcacgggtgttgtttttgggtagtgttgtactaattgaacactacccgtaggctcgtcgcagagcagtatatccggatttttcacgattgcacgccctattgacacacgctgctgctgtccaccagatagctgatttggaagcttatagcggtgctcgtaaagccccagcgtgtgaagcagctcatcgatatcaagtgcgttgtcagacagataagctcccac

SEQ ID NO: 34282 - DNA, 260 bp, Unknown
  Description of Unknown: RightRegion for integrase B8283 sequence
accttaaaagagatccgggtgaataatgccaatgaaattacaggcatctcatttttttaatctgtgttgtactaatcatacataacctgttggctcgtctgcaaggatcaaagccggacgggtaatcagcgcgcgtccaatggccactctctgctgctggccgccggaaagctggcttggcaggtaattccggcgatcttttaaattcagtacagtcagaagctcttccagatattttctgtccggcttctgataatcca

SEQ ID NO: 34283 - DNA, 138 bp, Unknown
  Description of Unknown: RightRegion for integrase B8284 sequence
gtcattaaagaaataagaattgataatgaccagaatatcacgggtgttgtttttgggtagtgttgtactaattgaacactacccgttggctcatcagccaaaattaattcaggatttgttattatcgcacgtgccact

SEQ ID NO: 34284 - DNA, 260 bp, Unknown
  Description of Unknown: RightRegion for integrase B8285 sequence
gtcattaaagaaataagaattgacaatgaccagaatatcacgggtgttgtttttgggtagtgttgtactaattgaacactacccgttggctcatcagccaaaattaattcaggatttgttattatcgcacgtgccactgctgccctttgcttctgtcctcctgacacctcgtatggatatttattaagcagcttttcaattccaagcagcgaagctataggtgcaagccttttttccatatccctatagtccacacctga

SEQ ID NO: 34285 - DNA, 260 bp, Unknown
  Description of Unknown: RightRegion for integrase B8286 sequence
gtcattaaagaaataaggattgacaatgaccagaatatcacgggtgttgtttttgggtagtgttgtactaattgaacactacccgttggcccatctgccaaaattaattcgggatttgttattatcgcacgtgccactgctgccctttgcttctgtcctcctgacacctcatatggatatttattaagcagcttttcaattccaagcagcgaagctataggtgcaagccttttttccatatccctatagtccacacctga

SEQ ID NO: 34286 - DNA, 260 bp, Unknown
  Description of Unknown: RightRegion for integrase B8287 sequence
gtcattaaagaaataaggattgacaatgaccagaatatcacgggtgttgtttttgggtagtgttgtactaattgaacactacccgtcggttcatcagcaaggataatcgcaggcttcgtaattaaagctcgtgcaatcgctacacgttgctgttgaccgcctgaaagattgttcggcatattttccagtttatcttctaaagccaacatatacacaacttcgtccataaatttctggtctactgtatcgccatccagttc

SEQ ID NO: 34287 - DNA, 167 bp, Unknown
  Description of Unknown: RightRegion for integrase B8288 sequence
accttaaaagagatccgggtgaataatgccaatgaaattacaggcatctcatttttttaatctgcgttgtactaatcatacataacctgtcggctcatccgcaaggataatagcaggctttgtcgcaagggcacgggcaatcgcaaccctctgctgttgaccacctg

SEQ ID NO: 34288 - DNA, 260 bp, Unknown
  Description of Unknown: RightRegion for integrase B8289 sequence
accttaaaagagatccgtgttaataatgccaatgaaatcacaggcatctcatttttttaatctgtgttgtactaatcatacataacctgtaggctcgtctgccagaacgatctttggcttggaagccagagcccttgcaatagccactctctgctgctggccgccggaaagctgattgggacggttcctggatttttccgtcagtcctaaaaggctcaatatttttccgataaactcatcatcaggtttatttccgtcca

SEQ ID NO: 34289 - DNA, 139 bp, Unknown
  Description of Unknown: RightRegion for integrase B8290 sequence
gtcattaaagaaataagaattgacaatgaccagaatatcacgggtgttgtttttgggtagtgttgtactaacttaacactacccgtcggctcatcagccaatatgatagaaggttttgctgccagcgctctggctatcg

SEQ ID NO: 34290 - DNA, 138 bp, Unknown
  Description of Unknown: RightRegion for integrase B8291 sequence
gtcattaaagaaataagaattgacaatgaccagaatatcacgggtgttgtttttgggtagtgttgtactaattgaacactacctgtcggttcatcggcaaggatcatttggggatgtaagatcagagcccttgctgcc

SEQ ID NO: 34291 - DNA, 260 bp, Unknown
  Description of Unknown: RightRegion for integrase B8292 sequence
gtcattaaagaaataaggattgacaatgaccagaatatcacgggtgttgtttttgggtagtgttgtactaattgaacactacccgtaggctcatcacataaaatggcttccggagatactgcaagcgcccttgcgattgcaactctttgttgttcaccgccggacaaattgattgggtaatcattttccttgctttctaagccgacactttttagcaagcctgtaattatctcgtgacgctgtttggcggtaaacgactt

SEQ ID NO: 34292 - DNA, 260 bp, Unknown
  Description of Unknown: RightRegion for integrase B8293 sequence
gtcattaaagaaataaggattgacaatgaccagaatatcacgggtgttgtttttgggtagtgttgtactaattgaacactacccgtcggttcatcggcaagtatgatatctgcattagtaaccaatgctcttgctatcgcaactctctgctgctgtccgcctgacatctttcccggaagcttgtttctttccgataatattccaagatgttccatctgttttaatataattctctttctttccttgcgcttaacattggc

SEQ ID NO: 34293 - DNA, 139 bp, Unknown
  Description of Unknown: RightRegion for integrase B8294 sequence
gtcattaaagaaataaggattgacaatgaccagaatatcacgggtgttgtttttgggtagtgttgtactaattgaacactacccgtcggctcatctgcaaatataatttccggacgattcaccagtgctcttgcaattg

SEQ ID NO: 34294 - DNA, 134 bp, Unknown
  Description of Unknown: RightRegion for integrase B8295 sequence
gtcattaaagaaataagaattgacaatgaccagaatatcacgggtgttgtttttgggtagtgttgtactaattgaacactacccgtgggctgtgttaagttagtacaaaataaagaaccccagtaaggttgttg

SEQ ID NO: 34295 - DNA, 260 bp, Unknown
  Description of Unknown: RightRegion for integrase B8296 sequence
gtcattaaagaaataaggattgacaatgaccagaatatcacgggtgttgtttttgggtagtgttgtactaattgaacactacccgtcggttcatcggccaaaatcagacggctgttattaaccagagctcttgcacatgcacatctttgctgctgtccaccggaaacctgatgcggatacttatctgctatttcttttatattgagaatttccataatcttttccgtctttttcatcacatctgttccctgatttttggt

SEQ ID NO: 34296 - DNA, 260 bp, Unknown
  Description of Unknown: RightRegion for integrase B8297 sequence
gtcattaaagaaataaggattgacaatgaccagaatatcacgggtgttgtttttgggtagtgttgtactaattgaacactacccgtgggctcatccgccaggatcagggacgggtcccctgcgagagcccgcgcgatggagactcgctgctgctggccgccggaaagctggttcggaagattcttccatttttcgtcgagaccgaccttttttaaggaattcatggcccgctcccgccgttctttcttgtcgtaaccggc

SEQ ID NO: 34297 - DNA, 260 bp, Unknown
  Description of Unknown: RightRegion for integrase B8298 sequence
gtcattaaagaaataagaattgacaatgaccagaatatcacgggtgttgtttttgggtagtgttgtactaattgaacactacctgtgggctgtgttaagttagtacaaaataaagaaccccagcaaggctgctgcctgctggggtcttcttctcttaaaactcttcttcgtagccagttgttttttgcactgttctcatataatctgccagcgtgtattccccgctgctgataaaatacctgttcgccccgtacccttgt

SEQ ID NO: 34298 - DNA, 260 bp, Unknown
  Description of Unknown: RightRegion for integrase B8299 sequence
gtcattaaagaaataaggattgacaatgaccagaatatcacgggtgttgttttttggtagtgttgtactaattgaacactacccgtaggctcgtcgcagagcagtatatccggatttttcacgattgcacgccctattgacacacgctgctgctgtccgccggatagctgatttggaagcttatagcggtgctcgtaaagccccagcgtgtgaagcagctcatcgatatccagtgcgttgtcagacagataagcgcccac

SEQ ID NO: 34299 - DNA, 260 bp, Unknown
  Description of Unknown: RightRegion for integrase B8300 sequence
gtcattaaagaaataaggattgacaatgaccagaatatcacgggtgttgtttttgggtagtgttgtactaattgaacactacccgtaggctcatccgcaagcagaagctttggatgattgaccatagctctcgctatcgccactctctgcttctgtcctcctgaaagctgtgttggcctgaaatcagccctgtctgaaagccctacacgctctaatgcctccatgcccatctgccttctgtcctttttgctcacaccggc

SEQ ID NO: 34300 - DNA, 260 bp, Unknown
  Description of Unknown: RightRegion for integrase B8301 sequence
gtcattaaagaaataaggattgacaatgaccagaatatcacgggtgttgtttttgggtagtgttgtactaattgaacactacccgtcggttcatcggctaagatcagctgcggctgtgtaatcagcgctcttgcgactgcggcacgctgtttttgtccgccggatacttcatacggatacttttccagcaaatgcgtgatttcaagcttctttgcaatcggttctaatttctgcatcatttgcgggtactgttctcctga

SEQ ID NO: 34301 - DNA, 260 bp, Unknown; identical to SEQ ID NO: 34291
  Description of Unknown: RightRegion for integrase B8302 sequence

SEQ ID NO: 34302 - DNA, 260 bp, Unknown
  Description of Unknown: RightRegion for integrase B8303 sequence
gtcattaaagaaataaggattgacaatgaccagaatatcacgggtgttgtttttgggtagtgttgtactaattgaacactacccgtaggctcatcgcataacagaaggctcggattcttgatcaaggctctggcgatggcacagcgttgctgttgtccgccggaaagttgtgccgggaacttgttctgatgttccgtcagtcccagtacctgcagcagttcctccatattcaaaggattcttcgtcagatactggcagac

SEQ ID NO: 34303 - DNA, 260 bp, Unknown
  Description of Unknown: RightRegion for integrase B8304 sequence
gtcattaaagaaataagaattgacaatgaccagaatatcacgggtgttgtttttgggtagtgttgtactaattgaacactacccgtgggctcgtcagccaggatcagcgacggatttcccgccagggccctggcaatggagaccctctgctgctggccgcctgaaagctgctttggaaaattcctccacttttctttcagtcctacccgttccagggattccatggcccgttccctccggtcccagggatccatgcccgc

SEQ ID NO: 34304 - DNA, 260 bp, Unknown
  Description of Unknown: RightRegion for integrase B8305 sequence
gtcattaaagaaataagaattgacaatgaccagaatatcacgggtgttgtttttgggtagtgttgtactaattgaacactacccgtaggctcatcagctagtattattggagcatctgataccaatgctctggcaatagctactctttgctgctgtccaccagataatttcataacatttctttttatttgttttttatctaagcccagttcaaacaagataccttcatctgctgatttattcaccaatctaatattttc

SEQ ID NO: 34305 - DNA, 260 bp, Unknown
  Description of Unknown: RightRegion for integrase B8306 sequence
gtcattaaagaaataagaattgacaatgaccagaatatcacgggtgttgtttttgggtagtgttgtactaattgaacactacccgtaggctcatcagccagtattattggagcatctgataccaatgctctggcaatagctactctttgctgctgtccaccagataatttcataacatttctttttatttgttttttatctaagcctaattcaaacaagatactttcatctgctgatttattcactaatctaatattttc

SEQ ID NO: 34306 - DNA, 260 bp, Unknown
  Description of Unknown: RightRegion for integrase B8307 sequence
gtcattaaagaaataaggattgacaatgaccagaatatcacgggtgttgttttttggtagtgttgtactaattgaacactacccgtcggctcatctgcaaatataatttccggacgattcaccagtgctcttgcaattgctactctctgctgctgtcctccggataactgatttggcagattataaatccggttttcaatccccagagttgcaataatatcatttacatacgcttcatccacttttcttccatccagccc

SEQ ID NO: 34307 - DNA, 86 bp, Unknown
  Description of Unknown: RightRegion for integrase B8308 sequence
gtcattaaagaaataagaattgacaatgaccagaatatcacgggtgttgtttttgggtagtgttgtactaattgaacactacccgt

SEQ ID NO: 34308 - DNA, 260 bp, Unknown
  Description of Unknown: RightRegion for integrase B8309 sequence
accttaaaagagatccgtgtaaataatgccaatgaaatcacaggcatctcatttttttaatctgtgttgtactaatcatacataacctgtaggttatatacaattagtacaacgtattttttttacaatcggcttgacatttatgtaatatggccatatagtaatcttgtcgagtacagtggatgctctgtatctcggttccacccgcaatcccggtggacacggattgaaattataacatcttagctaaaagcgagagc

SEQ ID NO: 34309 - DNA, 260 bp, Unknown
  Description of Unknown: RightRegion for integrase B8310 sequence
gtcattaaagaaataaggattgacaatgaccagaatatcacgggtgttgtttttgggtagtgttgtactaattgaacactacccgtgggctgtgttaagttagtacaaaataaagaaccccagcaaggctgctgcctgccggggtcttattttacagtccatttcctttgaacattgcccacccaccttttgaaaacgggttgtttttatcttttggaaagtcctttagatattgcttgaataaacttgctcttatatgt

SEQ ID NO: 34310 - DNA, 260 bp, Unknown
  Description of Unknown: RightRegion for integrase B8311 sequence
gtcattaaagaaataaggattgacaatgaccagaatatcacgggtgttgtttttgggtagtgttgtactaattgaacactacccgtgggcagtgttaagttagtacaaatataaaaaggctacacactgactgtgtacccctctgcaacgaaccccagcaagcctgctgcctgccggggttttgttattctcccatattgtctggcacgtcttcttccgtgaccgttctttctcttgcaatcagcttcaacggcaaaaac

SEQ ID NO: 34311 - DNA, 260 bp, Unknown
  Description of Unknown: RightRegion for integrase B8312 sequence
accttaaaagagatccgggtaaataatgccaatgaaattacaggcatctcatttttttaatctgtgttgtactaatcgtacataacctgtaggctcatcggcaagaataaaagccggatcattaataagagctcttccaaccgataccctctgctgctgaccgccggaaagctgtcccggaaggtgctttctcctgttggataatcctgtcatttccacaattcgctccagcttccctgcatccggctttctctggtcca

SEQ ID NO: 34312 - DNA, 260 bp, Unknown
  Description of Unknown: RightRegion for integrase B8313 sequence
atcatcaaagaaatatacattgataaagaaaagcgcattaccaaggttatatttttatagaattttatctgtatattttagtattgtcctgatggggagaccggagctgcgatgcgttatctctcccaacgatttgccatgccttaccgtcctgttatgggtatcctcacagatataggtacagaagcatcaaaatatgaatttgtagatttggtatagacgaaaaaagaaatactggcatatcccatctgctctatagt

SEQ ID NO: 34313 - DNA, 260 bp, Unknown
  Description of Unknown: RightRegion for integrase B8314 sequence
gtcattaaagaaataaggattgacaatgaccagaatatcacgggtgttgtttttgggtagtgttgtactaattgaacactacccgtcggctcatcagcgaatataactgaaggatgggtaattaatgcccttgcaattgcgactctctgctgctcaccacctgacatctgtgcagggaatttatccttacaataatctatgccaagtgattccattaattcagtaacttcctcctcatcatcttcctcactgtcaagaat

SEQ ID NO: 34314 - DNA, 260 bp, Unknown
  Description of Unknown: RightRegion for integrase B8315 sequence
gtcattaaagaaataaggattgacaatgaccagaatatcacgggtgttgtttttgggtagtgttgtactaattgaacactacccgtcggttcatcggctaagatcagctgcggctgtgtaatcagcgctcttgcgactgccgcacgctgtttttgcccgccggatacttcatacggatacttttccagcaaatgcgtgatttcaagcttctttgcaatcggttctaatttctgcatcatttgcgggtactgttctcctga

SEQ ID NO: 34315 - DNA, 128 bp, Unknown
  Description of Unknown: RightRegion for integrase B8316 sequence
gtcattaaagaaataagaattgacaatgaccagaatatcacgggtgttgtttttgggtagtgttgtactaattgaacactacccgtcggctcatcagccaaaataatatctggattagaaatcaaact

SEQ ID NO: 34316 - DNA, 260 bp, Unknown
  Description of Unknown: RightRegion for integrase B8317 sequence
gtcattaaagaaataagaattgacaatgaccagaatatcacgggtgttgtttttgggtagtgttgtactaattgaacactacccgtcggttcatctgcaagcaggatatccggatcattcactaatgcccgggcaatcgcaacacgctgcatctgtcccccggacatctgacttggtcgcttgtgaagctgcgcacctagtccaaccttttcaagcgcttctgtcgcacgcttccttctctcggacttgccaatccccga

SEQ ID NO: 34317 - DNA, 186 bp, Unknown
  Description of Unknown: RightRegion for integrase B8318 sequence
gtcattaaagaaataaggattgacaatgaccagaatatcacgggtgttgtttttgggtagtgttgtactaattgaacactacccgtaggctcatcagctagtattattggagcatctgataccaatgctctagcaatagctactctttgctgctgtccaccagataatttcataacatttcttttt

SEQ ID NO: 34318 - DNA, 260 bp, Unknown
  Description of Unknown: RightRegion for integrase B8319 sequence
gtcattaaagaaataaggattgacaatgaccagaatatcacgggtgttgtttttgggtagtgttgtactaattgaacactacccgtaggctcgtcgcagagcagtatatccggatttttcacgattgcacgccctattgacacacgctgctgctgtccgccggatagctgatttggaagcttatagcggtgctcgtaaagccccagcgtgtgaagcagctcatcgatatccagtgcgttgtcagacagataagcgcccac

SEQ ID NO: 34319 - DNA, 260 bp, Unknown
  Description of Unknown: RightRegion for integrase B8320 sequence
gtcattaaagaaattagaattgataatgaccagaatatcacgggtgttgtttttgggtagtgttgtactaatgtgacactacccgtcggctcatccgcaaatataatttccggacgattcaccagtgctcttgcaatcgctactctctgctgctgtcctccggataactgatttggcagattataaatcctcttttcaattcccagagtttcaatgatatcatttacatacgcttcatccacttttcttccatccagccc

SEQ ID NO: 34320 - DNA, 260 bp, Unknown
  Description of Unknown: RightRegion for integrase B8321 sequence
gtcattaaagaaataaggattgacaatgaccagaatatcacgggtgttgtttttgggtagtgttgtactaattgaacactacccgtaggctcgtcagcaagcaggatatcaggattatttacaagtgctcttgcaatagcaaccctctgcatctgtccacctgacatctgattaggcttcttgtgaatctgctctccaagtccaactttctcaagtgcctctatcgctcttttctttctctctgccttagatacacctga

SEQ ID NO: 34321 - DNA, 260 bp, Unknown
  Description of Unknown: RightRegion for integrase B8322 sequence
gtcattaaagaaataaggattgacaatgaccagaatatcacgggtgttgtttttgggtagtgttgtactaatttaacactacccgtaggctcatctgccagtaccagctccggcttgattatcaaggctcttgctaccgccgcacgctgtttctgtccgccggatacttcataaggatatttttccagaatatcaagaattccaagctgcgccgcaatcggtgttatgcgccgctccatctctttataatccacaccgga

SEQ ID NO: 34322 - DNA, 260 bp, Unknown
  Description of Unknown: RightRegion for integrase B8323 sequence
gtcattaaagaaataaggattgacaatgaccagaatatcacgggtgttgtttttgggtagtgttgtactaattgaacactacccgtcggctcatcagccaaaataatatctggattagaaatcaaactacgggctgcggctacacgctgcttttgaccgccggacatttgcgccggaaactttgaaagaacatcagtaattccaagaaatccggctatatcatttaggtgcttttcggctatggaactatctatattgtg

SEQ ID NO: 34323 - DNA, 260 bp, Unknown
  Description of Unknown: RightRegion for integrase B8324 sequence
gtcattaaagaaataaggattgacaatgaccagaatatcacgggtgttgtttttgggtagtgttgtactaattgaacactacccgtcgggtatgtagagttaagggaaattacgtatttctcgtctgcgctgtcaattctgctatcgcagatatatacgtaatagtctttacctaccgcaaaagcgctgcctgcgtccagattagcagccgtaagaatggtgtttgctgtcttgaaaattccagcaccacccacggcaat

SEQ ID NO: 34324 - DNA, 260 bp, Unknown
  Description of Unknown: RightRegion for integrase B8325 sequence
gtcattaaagaaataaagattgacaatgaccagaatatcacgggtgttgtttttgggtagtgttgtactaacttaacactacccgttggctcatctgccaaaataatatcggggtcggaaatcaaactgcgggcggcagcgacgcgctgtttttgaccacctgacatctgcgccggaaatttggagagcacatccgtgattccaaaaagtcctgcaatgtcattcaacttcttctccgcagcagatatatctacattatg

SEQ ID NO: 34325 - DNA, 260 bp, Unknown
  Description of Unknown: RightRegion for integrase B8326 sequence
gtcattaaagaaataaggattgacaatgaccagaatatcacgggtgttgtttttgggtagtgttgtactaattgaacactacccgtgggttcatccgctaagagaatagccggcttataagataatgcccgggcaattgctgttctctgctgctgaccgccggataacgtacccggcagtgcatcccgcttatcttctattttcagttgccttaacaattcttctatatatgccttgtccacataacctccatccagctc

SEQ ID NO: 34326 - DNA, 85 bp, Unknown
  Description of Unknown: RightRegion for integrase B8327 sequence
gtcattaaagaaataatgattgacaatgaccagaatatcacgggtgttgtttttgggtagtgttgtactaattgaacactacccg

SEQ ID NO: 34327 - DNA, 260 bp, Unknown
  Description of Unknown: RightRegion for integrase B8328 sequence
gtcattaaagaaataaggattgacaatgaccagaatatcacgggtgttgtttttgggtagtgttgtactaattgaacactacccgtgggctcatccgcaagcagtatgtccggcttatttgccagtgccaccgctatcgctgcgcgctgctgctctcctcccgatagctgagccggaagcttatccttatgctcctgtaatcccactgcatttaacagtttaagggcatagcttttattatcatccttgcgtttttttat

SEQ ID NO: 34328 - DNA, 139 bp, Unknown
  Description of Unknown: RightRegion for integrase B8329 sequence
gtcattaaagaaataaaaattgacaatgaccagaatatcacgggtgttgtttttgggtagtgttgtactaattgaacactacccgttggctcatctgccaataagagtttcggattgttgataattgctcttgcacagg

SEQ ID NO: 34329 - DNA, 260 bp, Unknown
  Description of Unknown: RightRegion for integrase B8330 sequence
tcaattatagataaaatctatgtagaagataatcaaattaaaaagattacatttctgtaatctttttttattaattgtccatattttccggagcatctgttggacatactccttggcatgttccacattctatacatatttctgggtctattatgtatttatcgtccccttctgaaatacaacttactggacatgctgctgcacatgctccacattttatacatctatctgttattttataagccactttttttcacctc

SEQ ID NO: 34330 - DNA, 139 bp, Unknown
  Description of Unknown: RightRegion for integrase B8331 sequence
gtcattaaagaaataaggattgacaatgaccagaatatcacgggtgttgtttttgggtagtgttgtactaacttaacactacccgtcggctcatctgcaaatataatttccggacgattcaccagtgctcttgcaattg

SEQ ID NO: 34331 - DNA, 109 bp, Unknown
  Description of Unknown: RightRegion for integrase B8332 sequence
aggattattgataaaatttatattgagaacggcgaaattaaagaggttacttttttgtaacctcttttgatgtataatctcttgcatttctagtattttatcgttccaa

SEQ ID NO: 34332 - DNA, 260 bp, Unknown
  Description of Unknown: RightRegion for integrase B8333 sequence
gtcattaaagaaataaggattgacaatgaccagaatatcacgggtgttgtttttgggtagtgttgtactaattgaacactacccgtgggctgtgttaagttagtacaaaatagaaaaccccagcaaggctgctgcctgccggggttttattttacagtccatttccattgaacattgcccacccgccttttgaaaacgggttgtttttatctttcggaaagtcctttagatattgcttgaataaacttgctcttatatgt

SEQ ID NO: 34333 - DNA, 260 bp, Unknown
  Description of Unknown: RightRegion for integrase B8334 sequence
gtcattaaagaaataagaattgacaatgaccagaatatcacgggtgttgtttttgggtagtgttgtactaattgaacactacccgtaggctcatcagccagtattattggagcatctgataccaatgctctggcaatagctactctttgctgctgtccaccagataatttcataacatttctttttatttgttttttatctaagcctagttcaaacaagatactttcatctgctgatttattcactaatctaatattttc

SEQ ID NO: 34334 - DNA, 260 bp, Unknown
  Description of Unknown: RightRegion for integrase B8335 sequence
gtcattaaagaaataagaattgacaatgaccagaatatcacgggtgttgtttttgggtagtgttgtactaattgaacactacccgtcggctcgtcaccgagaagaatctttggattctttgcaagtgcccgcgcaattgagacacgctgctgttctccgcctgacatctgggctggaaatttatttctgcactcactaagtcccaccagcttcaaaagctcatccgcatcccttgcacccttcacaatacttttaaccag

SEQ ID NO: 34335 - DNA, 260 bp, Unknown
  Description of Unknown: RightRegion for integrase B8336 sequence
gtcattaaagaaataaggattgacaatgaccagaatatcacgggtgttgtttttgggtagtgttgtactaattgaacactacccgtcggctcatcgcagagaagcaaatccggtcttttgacaaccgcccttgcaacagaaatacgctgctgttccccaccggaaagctgagacggaaagtgacctgcccgctcctccagaccgaccatggcgagcgcctcatccgccttcatcgcacttttcacaagtgacgccgccag

SEQ ID NO: 34336 - DNA, 160 bp, Unknown
  Description of Unknown: RightRegion for integrase B8337 sequence
gtcattaaagaaataaggattgacaatgaccagaatatcacgggtgttgtttttgggtagtgttgtactaattgaacactacccgtaggctcgtcagccagaacgatagcaggcttcgataccagagcgcgggcgatggctacacgctgctgctggccgc

SEQ ID NO: 34337 - DNA, 260 bp, Unknown
  Description of Unknown: RightRegion for integrase B8338 sequence
gtcattaaagaaataagaattgacaatgaccagaatatcacgggtgttgtttttgggtagtgttgtactaattgaacactacccgtgggttcatccgctaaaagaatagccggcttataagataatgccctggcaattgctgttctctgctgctgaccgccggataacgtacccggcagtgcatcccgcttatcttctattttcagttgccttaacaattcttctatatatgccttgtccacataacctccatccagctc

SEQ ID NO: 34338 - DNA, 160 bp, Unknown
  Description of Unknown: RightRegion for integrase B8339 sequence
gtcattaaagaaataaggattgacaatgaccagaatatcacgggtgttgtttttgggtagtgttgtactaattgaacactacccgtaggctcatcagctaaaataatctgaggagtattgatcaatgccctcgctattgccacacgctgtttctgccctc

SEQ ID NO: 34339 - DNA, 259 bp, Unknown
  Description of Unknown: RightRegion for integrase B8340 sequence
gtcattaaagaaataagaattgacaatgaccagaatatcacgggtgttgtttttgggtagtgttgtactaattgaacactacccgtaggctcatcagccagtattattggagcatctgataccaatgctctggcaatagctactctttgctgctgtccaccagataatttcataacatttctttttatttgttttttatctaagcctagttcaaacaagatactttcatctgctgatttattcactaatctaatatttt

SEQ ID NO: 34340 - DNA, 260 bp, Unknown
  Description of Unknown: RightRegion for integrase B8341 sequence
gtcattaaggaaataaagattgataatgaccagaatatcacgggtgttgtttttgggtagtgttgtactaattgaacactacccgtaggctcatccgcaaaaattacatccggctttgcaatcaaagcgcgggcaatggctacacgctgctgctggccgccggataactcatggggcagatgttccaagcggccctgaatgccaagcagttctgtaagttgtttcaggtatgcttcatccggtttttgcttatccagcaa

SEQ ID NO: 34341 - DNA, 260 bp, Unknown
  Description of Unknown: RightRegion for integrase B8342 sequence
gtcattaaagaaataaggattgacaatgaccagaatatcacgggtgttgtttttgggtagtgttgtactaatcgaacactacccgtcggttcatctgccagaatcagctgcggacgggtgatcagcgcgcgggcaaccgccgccctctgcttctgtccgccggaaacctcatacggatacttctccagcagcgcgtcgatcccgagcttttcggcaatcggtcaaagcctctcctccatctcctgcaccggcgcatctgc

SEQ ID NO: 34342 - DNA, 260 bp, Unknown
  Description of Unknown: RightRegion for integrase B8343 sequence
gtcattaaagaaataagaattgacaatgaccagaatatcacgggtgttgtttttgggtagtgttgtactaattgaacactacccgtgggctgtgttaagttagtacaaaataaataaccccagcaaatatgcggtctgctggggttcttctttttaattattttcaattatctttgcgcctgctgccagtgctgcttttctgattgcctgtttctgctcttccagcgtctttggcatatccagtttgcgtggctcaaccg

SEQ ID NO: 34343 - DNA, 138 bp, Unknown
  Description of Unknown: RightRegion for integrase B8344 sequence
gtcattaaagaaataagaattgacaatgaccagaatatcacgggtgttgtttttgggtagtgttatactaattgaacactacccgttggttcgtctgccagtatgatcctaggctgattgatcaacgccctcgcgatc

SEQ ID NO: 34344 - DNA, 260 bp, Unknown
  Description of Unknown: RightRegion for integrase B8345 sequence
gtcattaaggaaataaagattgataatgaccagaatatcacgggtgttgtttttgggtagtgttgtactaattgaacactacccgttggctcatcagccaaaattaattcgggatttgttattatcgcacgtgccactgctgccctttgcttctgtcctcctgacacctcatatggatatttattaagcagcttttcaattccaagcagcgaagctataggtgcaagccttttttccatatccctataatccacacctga

SEQ ID NO: 34345 - DNA, 260 bp, Unknown
  Description of Unknown: RightRegion for integrase B8346 sequence
accttaaaagagatccgggtgaataatgccaatgaaattacaggcatctcatttttttaatctgtgttgtactaatcatacataacctgtaggttcgtctgcaagaaacagagaaggcttcgtcaccagcgctcttgcaatggcaactctttgctgctggcctccggaaagctctgtaggacggtggtgcattctatgagacagctctaccttttccagagctttacggactctctcctttctttctgctgctttgactc

SEQ ID NO: 34346 - DNA, 153 bp, Unknown
  Description of Unknown: RightRegion for integrase B8347 sequence
gtcattaaagaaataaggattgacaatgaccagaatatcacgggtgttgtttttgggtagtgttgtactaattgaacactacccgtaggctcatcagctagtattattggagcatctgataccaatgctctggcaatagctactctttgctgc

SEQ ID NO: 34347 - DNA, 95 bp, Unknown
  Description of Unknown: RightRegion for integrase B8348 sequence
gtcattaaagaaataagaattgacaatgaccagaatatcacgggtgttgtttttgggtagtgttgtactaattgaacactacccgttggctcatc

SEQ ID NO: 34348 - DNA, 260 bp, Unknown
  Description of Unknown: RightRegion for integrase B8349 sequence
gtcattaaagaaataaggattgacaatgaccagaatatcacgggtgttgtttttgggtagtgttgtactaattgaacactacccgttggctcatcagccaaaattaattcgggatttgttattatcgcacgtgccactgctgccctttgcttctgtcctcctgacacctcgtatggatatttattaagcagcttttcaattccaagcagtgaagctataggtgcaagccttttttccatatccctatagtccacacctga

SEQ ID NO: 34349 - DNA, 260 bp, Unknown
  Description of Unknown: RightRegion for integrase B8350 sequence
gtcattaaagaaataaggattgacaatgaccagaatatcacgggtgttgtttttgggtagtgttgtactaattgaacactacccgttggctcatcagccaaaattaattcgggatttgttattatcgcacgtgccactgctgccctttgcttctgtcctcctgacacctcgtatggatatttattaagcagcttttcaattccaagcagcgaagctataggtgcaagccttttttccatatccctatagtccacacctga

SEQ ID NO: 34350 - DNA, 260 bp, Unknown
  Description of Unknown: RightRegion for integrase B8351 sequence
gtcattaaagaaataaggattgacaatgaccagaatatcacgggtgttgtttttgggtagtgttgtactaattgaacactacccgtaggctcgtccgccaaaatcagcttaggctgattgataatggctctggcacaggcgcaccgctgcttctggccgccggacacctgatatgggtacttatccagaatatccatgatattcagctttccggccatttcccgcacccgtccatcaatctcgcctgctggaaccttgtt

SEQ ID NO: 34351 - DNA, 260 bp, Unknown
  Description of Unknown: RightRegion for integrase B8352 sequence
gtcattaaagaaataagaattgacaatgaccagaatatcacgggtgttgtttttgggtagtgttgtactaattgaacactacccgtaggctgttctgcaatcagaacttctgggttgtggctgcactctctggctacgactactttctgcatatttccgccggacagcattcccacattctgtcccgtgccggaacagcgtatttcgtaggatttaatgcgctcctccgcaaattttaatatctttttatagttcagaag

SEQ ID NO: 34352 - DNA, 260 bp, Unknown
  Description of Unknown: RightRegion for integrase B8353 sequence
gtcattaaagaaataaggattgacaatgaccagaatatcacgggtgttgtttttgggtagtgttgtactaacttaacactacccgttggctcatcagccaaaattaattcgggatttgttattatcgcacgtgccactgctgccctttgcttctgtcctcctgacacctcgtatggatatttattaagcagcttttcaattccaagcagcgaagctataggtgcaagccttttttccatatccctataatccacacctga

SEQ ID NO: 34353 - DNA, 260 bp, Unknown
  Description of Unknown: RightRegion for integrase B8354 sequence
gtcattaaagaaataagaattgacaatgaccagaatatcacgggtgttgtttttgggtagtgttgtactaattgaacactacccgtgggctcatcacataataatatgtcgggatttttaacaatagccctgcctattgcagttctttgctgttgtccgccagataactggttaggaagcttatgcctgtgctcatacagccctaatgtattaagcagttcgttaatatcaagcggtgaatcgctaagataagcaccaac

SEQ ID NO: 34354 - DNA, 135 bp, Unknown
  Description of Unknown: RightRegion for integrase B8355 sequence
gtcattaaagaaataaagattgataatgaccagaatatcacgggtgttgtttttgggtagtgttgtactaattgaacactacccgtcggttcatcggcaaggatcatttggggatgtaagatcagagcccttgct

SEQ ID NO: 34355 - DNA, 165 bp, Unknown
  Description of Unknown: RightRegion for integrase B8356 sequence
gtcattaaagaaataaggattgacaatgaccagaatatcacgggtgttgtttttgggtagtgttgtactaatttaacactacccgtaggctcgtcgcagagcagtatatccggatttttcacgattgcacgcccgattgacacacgctgctgctgtccaccggat

SEQ ID NO: 34356 - DNA, 260 bp, Unknown
  Description of Unknown: RightRegion for integrase B8357 sequence
gtcattaaagaaataagaattgataatgaccagaatatcacgggtgttgtttttgggtagtgttgtactaattgaacactacccgttggttcatctgccagaatgatgcccggattcaggatcagtgctctggctgctgccagtctctgcttctgtccgcctgacatctgcgatgggaacttatccagtacctcggtgatctccagatatttcgctaactgctccagacgctttccgccctctgcctccgatatgttatg

SEQ ID NO: 34357 - DNA, 260 bp, Unknown
  Description of Unknown: RightRegion for integrase B8358 sequence
gtcattaaagaaataaggattgacaatgaccagaatatcacgggtgctgtttttgggtagtgttgtactaattgaacactacccgtgggttcatccgctaaaagaatagccggcttataagataatgccctggcaattgctgttctctgctgctgaccgccggataacgtacccggcagtgcatcccgcttatcttctattttcagttgccttaacaattcttctatatatgccttgtccacataacctccatccagctc

SEQ ID NO: 34358 - DNA, 260 bp, Unknown
  Description of Unknown: RightRegion for integrase B8359 sequence
gtcattaaagaaataaggattgacaatgaccagaatatcacgggtgttgtttttgggtagtgttgtactaattgaacactacccgtgggttcatcgcacaacagaaggctgggatttttgatcagtgctctggcaatggcacaacgctgctgttgtccaccggacagttgtgcagggaacttgttctgatgttccgtaagaccaagtacctgcaataattcctccagatccaagggatttttcgtcagatactgacagac

SEQ ID NO: 34359 - DNA, 260 bp, Unknown
  Description of Unknown: RightRegion for integrase B8360 sequence
gtcattaaagaaataaggattgacaatgaccagaatatcacgggtgttgtttttgggtagtgttgtactaattgaacactacccgttggctcatctgccaaaattaattcgggatttgttattatcgcacgtgccactgctgccctttgcttctgtcctcctgacacctcatatggatatttattaagcagcttttcaattccaagcagcgaagctataggtgcaagccttttttccatatccctataatccacacctga

SEQ ID NO: 34360 - DNA, 260 bp, Unknown
  Description of Unknown: RightRegion for integrase B8361 sequence
gtcattaaagaaataaggattgacaatgaccagaatatcacgggtgttgtttttgggtagtgttgtactaattgaacactacccgtgggctcatccgccaggatcagggatgggtctcccgccagtgccctggcaatggaaaccctctgctgctggccgccggataactggttgggcagatttttccatttttcctccagtccaacctttgctaacgattttaaggcccgctccttgcgctcctggacagacactccggc

SEQ ID NO: 34361 - DNA, 260 bp, Unknown
  Description of Unknown: RightRegion for integrase B8362 sequence
gtcattaaagaaattagaattgataatgaccagaatatcacgggtgttgtttttgggtagtgttgtactaatgtgacactacccgtgggcagtgttaagttagtacaaatataaaaaggctacacactgactgtgtacccctctgcaacgaaccccagcaagcctgctgcctgccggggttttgttattctcccatattgtctggcacgtcttcttccgtgaccgttctttctcttgcaatcagcttcaacggcaaaaac

SEQ ID NO: 34362 - DNA, 138 bp, Unknown
  Description of Unknown: RightRegion for integrase B8363 sequence
gtcattaaagaaataaggattgacaatgaccagaatatcacgggtgttgtttttgggtagtgttgtactaattgaacactacccgtgggctgtgttaagttggtacaaaacaaagaaccccagcaaggctgctgcctg

SEQ ID NO: 34363 - DNA, 109 bp, Unknown
  Description of Unknown: RightRegion for integrase B8364 sequence
tctataataaatagtgttggtgagaaatcatcagcactatttttgtatggaaatgtataaaaaatagacatagaaatcacattcctataaaatatagttgcaaccaaat

SEQ ID NO: 34364 - DNA, 260 bp, Unknown
  Description of Unknown: RightRegion for integrase B8365 sequence
gtcattaaagaaataaggattgacaatgaccagaatatcacgggtgttgtttttgggtagtgttgtactaattgaacactacccgtgggctgtgttaagttagtacaaaataaagaaccccagcaaatatgcggtctgctggggttcttcttttctaaaactcttcttcgtagccagttgttttccactgtaaaacttcgccgtcgtcgtccacttcgtctggctcctgcactggtctgtatgttctttcttttccctct

SEQ ID NO: 34365 - DNA, 151 bp, Unknown
  Description of Unknown: RightRegion for integrase B8366 sequence
gtcattaaagaaataagaattgacaatgaccagaatatcacgggtgttgtttttgggtagtgttgtactaattgaacactacccgttggctcatcagccaaaattaattcgggatttgttattatcgcacgtgccactgctgccctttgct

SEQ ID NO: 34366 - DNA, 85 bp, Unknown
  Description of Unknown: RightRegion for integrase B8367 sequence
gtcattaaagaaataagaattgataatgaccagaatatcacgggtgttgtttttgggtagtgttgtactaattgaacactacccg

SEQ ID NO: 34367 - DNA, 260 bp, Unknown
  Description of Unknown: RightRegion for integrase B8368 sequence
accttaaaagagatccgggtgaataatgccaatgaaattacaggcatctcatttttttaatctgtgttgtactaatcatacataacctgtaggctcatcggcaagaataaaagccggatcattaataagagctcttccaaccgataccctctgctgctgaccgccggaaagctgtcccggaaggtgctttctcctgttggataatcctgtcatttccacaattcgctccagcttccctgcatccggctttctctggtcca

SEQ ID NO: 34368 - DNA, 260 bp, Unknown
  Description of Unknown: RightRegion for integrase B8369 sequence
gtcattaaagaaataaggattgacaatgaccagaatatcacgggtgttgtttttgggtagtgttgtactaattgaacactacccgtcggctgtgttaagttagtacaaaataaagaaccccagcaaggctgctgcctgccggggtcttctcttactctcccattgtgtctggcacatcttctgtggtcacttttctttctcttgcaatcaacttcaatggcaagaatgggcaatgtctgtatgtttcgtacttgtcgccc

SEQ ID NO: 34369 - DNA, 260 bp, Unknown
  Description of Unknown: RightRegion for integrase B8370 sequence
gtcattaaagaaataaggattgacaatgaccagaatatcacgggtgttgtttttgggtagtgttgtactaattgaacactacccgtgggctgtgttaagttggtacaaatataaaaaggctacacactgactgtgtacccctctgcaacgaaccccagcaagccttctgcctgccggggttttgttattctcccatattgtctggcacgtcttcttccgtgaccgttctttctcttgcaatcagcttcaacggcaaaaac

SEQ ID NO: 34370 - DNA, 260 bp, Unknown
  Description of Unknown: RightRegion for integrase B8371 sequence
gtcattaaagaaataaggattgacaatgaccagaatatcacgggtgttgtttttgggtagtgttgtactaattgaacactacccgtgggctgtgttaagttagtacaaaataaagaaccccagcaagcctgctgcctgccggggttcttctttttattttgtcttgtgcagttctggcgggtgttttctcccatctatccacccggacagtttttgcccgcactccgggcagttttccggttgccccgtgtagtcatcaa

SEQ ID NO: 34371 - DNA, 260 bp, Unknown
  Description of Unknown: RightRegion for integrase B8372 sequence
gtcattaaagaaataaggattgacaatgaccagaatatcacgggtgttgtttttgggtagtgttgtactaattgaacactacccgtaggttcatctgccaggatcagggacggatccccggccaatgccctggctatagaaacacgctgctgctggccgccggataactggtttggcatatttttccatttttctgccagacctactttttctaaagaagccatagcccgctgcctgcgttcttcacttcccactcctgc

SEQ ID NO: 34372 - DNA, 260 bp, Unknown
  Description of Unknown: RightRegion for integrase B8373 sequence
gtcattaaagaaataagaattgacaatgaccagaatatcacgggtgttgtttttgggtagtgttgtactaattgaacactacccgtgggctgtgttaagttagtacaaaatagaagaaccccagcaaggctgctgcctgccggggttcttcttttctaaaactcttcttcgtagccagttgttttccactgtaaaacttcgccgtcgtcgtccacttcgtctggctcctgcactggtctgtatgttctttcttttccctc

SEQ ID NO: 34373 - DNA, 260 bp, Unknown
  Description of Unknown: RightRegion for integrase B8374 sequence
gtcattaaagaaataaggattgacaatgaccagaatatcacgggtgttgtttttgggtagtgttgtactaattgaacactacccgtaggtgcccgggacaaccaaaaggcggccgaacttctcaaaccggatagaacggctctgctccgaaatgaccgtcatcccgtgggacaaaagctcatcctgggcagtggccgtatacagaaactcggtagagtatccgtcccggacaaaagatgtgatgaaacggatgctcttat

SEQ ID NO: 34374 - DNA, 96 bp, Unknown
  Description of Unknown: RightRegion for integrase B8375 sequence
gtcattaaagaaataagaattgacaatgaccagaatatcacgggtgttgtttttgggtagtgttgtactaattgaacactacccgttggctcatcg

SEQ ID NO: 34375 - DNA, 260 bp, Unknown; identical to SEQ ID NO: 34348
  Description of Unknown: RightRegion for integrase B8376 sequence

SEQ ID NO: 34376 - DNA, 260 bp, Unknown
  Description of Unknown: RightRegion for integrase B8377 sequence
agtgttatcaaggaaatacgcgttgatgagcaaagaaatgtgaccattatttttttataattttcgtactactaaccgatattaaccagttggttagtatcagttagtacaataaaaacaccggactgtgtttctcgtccggtgttttactttgttggtatgtattcaatctaagccaatgttattttttattcacaaatcttttttaagaaatcatcatcaacgtcatagtggaccatttttttaatttcctccgcgct

SEQ ID NO: 34377 - DNA, 260 bp, Unknown
  Description of Unknown: RightRegion for integrase B8378 sequence
gtcattaaagaaataaggattgacaatgaccagaatatcacgggtgttgtttttgggtagtgttgtactaattgaacactacccgtgggctcatcagccaaaattaattcgggatttgttattatcgcacgtgccactgctgccctttgcttctgtcctcctgacacctcatatggatatttattaagcagcttttcaattccaagcagcgaagctataggtgcaagccttttttccatatccctatagtccacacctga

SEQ ID NO: 34378 - DNA, 138 bp, Unknown
  Description of Unknown: RightRegion for integrase B8379 sequence
gtcattaaagaaataaggattgacaatgaccagaatatcacgggtgttgtttttgggtagtgttgtactaattgaacactacccgtcggctcatctgcaaatataatttccggacgattcaccagtgctcttgcaatt

SEQ ID NO: 34379 - DNA, 260 bp, Unknown
  Description of Unknown: RightRegion for integrase B8380 sequence
gtcattaaagaaataagaattgacaatgaccagaatatcacgggtgttgtttttgggtagtgttgtactaattgaacactacccgtcggctcatcagccaaaataatatctggattagaaatcaaactacgggctgcggctacacgctgcttttgaccgccggacatttgcgccggaaactttgaaagaacatcagtaattccaagaaatccggctatatcatttaggtgcttttcggctatggaactatctatattgtg

SEQ ID NO: 34380 - DNA, 260 bp, Unknown
  Description of Unknown: RightRegion for integrase B8381 sequence
gtcattaaagaaataagaattgacaatgaccagaatatcacgggtgttgtttttgggtagtgttgtactaatgctacactacccgtcggttcatcagctaaaatcagtttcggttcattgattaaggctctagcacaagcacaacgctgtttttgtccgccagaaacttcataaggaaatttcgataaaatatcacgaatacccaatttatcggcgatagcatgaactcttttctcaatatcagtagggttctgtttgtt

SEQ ID NO: 34381 - DNA, 260 bp, Unknown
  Description of Unknown: RightRegion for integrase B8382 sequence
gtcattaaagaaataaggattgacaatgaccagaatatcacgggtgttgtttttgggtagtgttgtactaattgaacactacccgtcggctcatcagcgaatataactgacggatgtgtaatcagtgcccttgcgattgcaactctctgctgttcaccacctgacatctgtgcaggaaatttatccttacagtaatctatgccaagtgattccattaattcagtgactttctcctcatcagcttgctcactgtcaagaat

SEQ ID NO: 34382 - DNA, 260 bp, Unknown
  Description of Unknown: RightRegion for integrase B8383 sequence
gtcattaaagaaataagaattgacaatgaccagaatatcacgggtgttgtttttgggtagtgttgtactaattgaacactacccgtgggctgtgttaagttagtacaaaatagaaaaccccagcaaggctgctgcctgccggggttcttctttttattttgtcttgtgcagttctggcgggtgttttctcccatctatccacccagatagtttttgcccgcactttgggcacttttccggctgtcctgtgtagtcatcaa

SEQ ID NO: 34383 - DNA, 260 bp, Unknown
  Description of Unknown: RightRegion for integrase B8384 sequence
gtcattaaagaaataaagattgataatgaccagaatatcacgggtgttgtttttgggtagtgttgtactaattgaacactacccgtgggctgtgttaagttagtacaaaataaagaaccccagcaaggctgctgcctgcctgggttcttcttttctaaaactcttcttcgtagccagttgttttccactgtaaaacttcgccgtcgtcgtccacttcgtctggctcctgcactggtctgtatgttctttcttttccctct

SEQ ID NO: 34384 - DNA, 260 bp, Unknown
  Description of Unknown: RightRegion for integrase B8385 sequence
gtcattaaagaaataaggattgacaatgaccagaatatcacgggtgttgtttttgggtagtgttgtactaacttaacactacccgtcggttcatcagctaatatcagttttggtttattgattaaagccctagcacaagcacaacgttgtttttgtccgcccgaaacttcgtaaggaaattttgataaaatatctcgaatacctaatttgtcagcgatagcatgaacccgtttctcaatatcggcagggttctgtttgtt

SEQ ID NO: 34385 - DNA, 260 bp, Unknown
  Description of Unknown: RightRegion for integrase B8386 sequence
ataatatctaaaattgttattgtcaatgacaacattgaaattcagttgaagaatttttagcagtaactatacgccgtgccaatagcatatagttagtgcaaatgccgtatttatcgcattttttaacactcgaaaattgaatatctgaacttgatgtcgcttttgtgtcgcttatgtgtcgcgttaagcggctttttttatgccaaaatttaagcataaggaggacggcaatctatgttttcagatgaagttttagaaaa

SEQ ID NO: 34386 - DNA, 260 bp, Unknown
  Description of Unknown: RightRegion for integrase B8387 sequence
attaaaaatattgtagtttatccagatggaaatttgaaaataaattttttaggatattgattttatttgcactaacaaatactaaccagatggatgattatgagctaatagtatgcgagcagaagaatatttaaccgcttcccgaaaaatttcgcgtggatgagcaatactaataaacaaaaccatatacctaaaatattacatttatacaaatcgatagacaacacaaacatacattcggtataattatattactagga

SEQ ID NO: 34387 - DNA, 260 bp, Unknown
  Description of Unknown: RightRegion for integrase B8388 sequence
atttgcataaaagagattattatcaataaagatgcaattgatatagtttacaatttttagaaaggagacctttttcaccctccatatatcattcctatgataatgggcgaattgcggcgctacctgagggactcaggttcgatccgtgtcagccgttctatgcgtgatctggcttataaagctatgcaggcaagagaaaaacttaccaatgacaattctaaagagcctacaattgagcagatagcaaaagaaatagatgc

SEQ ID NO: 34388 - DNA, 260 bp, Unknown
  Description of Unknown: RightRegion for integrase B8389 sequence
ataatatctaaaattgttattgtcaatgacaacattgaaattcagttgaagaatttttagcagtaactatacgctgtgccaatagcatatagttagtgcaaatgccgtatttatcgcattttttaacacttaaaaattgaatatctgaacttgatgtcgcttttgtgtcacttatgtgtcgcgttaagcggctttttttatgccaaaatttaagcataaggaggacggcaatctatgttttcagatgaaattttagagaa

SEQ ID NO: 34389 - DNA, 109 bp, Unknown
  Description of Unknown: RightRegion for integrase B8390 sequence
attaaaaatattgtggtttatccagatggaaatttgaaaataaattttttaggatattgattttatttgcactaataaatactaaccagatggatgattatgagctaat

SEQ ID NO: 34390 - DNA, 260 bp, Unknown
  Description of Unknown: RightRegion for integrase B8391 sequence
atttgcataaaagagattattatcaataaagatgcaattgatatagtttacaatttttagaaaggagagcttttttcaccctccatatatcatcccaatagcgtatggagggtgaaaaggcactgttactgcgaaatgacaagatacgaagcgattgaaagagcaatagaaattataagtgaaaaagaaggcgttgaaactaaaaccgaaatattgaaaaatttggaaaaagtgaaaatactcctaaaaaatgaatggac

SEQ ID NO: 34391 - DNA, 260 bp, Unknown
  Description of Unknown: RightRegion for integrase B8392 sequence
gaaaagattgtaattgtcaatggaaatgttgaaattcaattgaagaatttttttcactgactatatatcataccgatagcatatagcttgtgaaaatgtcgtgtttatcatactttcaagagttgcaaaaatcagagtgtcgcttaaatgtcgtttctaagacgtttgaagcgtctttttttttgccaaaatttaggtacaaggagggcatgatatgttttcggatgaaatacttgaaaagatttttggaagagatgatg

SEQ ID NO: 34392 - DNA, 109 bp, Unknown
  Description of Unknown: RightRegion for integrase B8393 sequence
atcatcaaagaaatatacattgataaagaaaagcacattaccaaagttatatttttatagaattttgtctgtatattttagcattgtcctgatggtgagaccggagcgg

SEQ ID NO: 34393 - DNA, 260 bp, Unknown
  Description of Unknown: RightRegion for integrase B8394 sequence
aaagaaatccatgtagacccggaaacccgcaagataagcggcttccggctgaatgcctgatgggtgtagtaacttatattactctaccgtgaaatccccctgtccgccagaaaatgctgctgccgtggaaccaaaatcgatgctctggtcgatggaaaggtcttcggtcggatcaaagttgtgctgctttaaaatatattcaaataccatttccggcatgccgcctgccctgccacccagcacttttttgcccttcagca

SEQ ID NO: 34394 - DNA, 260 bp, Unknown
  Description of Unknown: RightRegion for integrase B8395 sequence
ataatatctaaaattgttattgtcaatgacaacattgaaattcagttgaagaatttttagcagtaactatacgccgtgccaatgataattggggagattaggagatacctccgggacaacagccagataagagtatcgcgttcgcttaaagatacggcatataaggcgatttatgccaaagagcgccttatgaaacaaagccagaaagagccgacgattaatgaaattgccgctgaaataggtgtggacaaagaagaaat

SEQ ID NO: 34395 - DNA, 260 bp, Unknown
  Description of Unknown: RightRegion for integrase B8396 sequence
atttgcataaaagagattattatcaataaagatgcgattgatatagtttacaatttttagaaaggaggcttttttcaccctccatatatcattcctatgataatgggcgaattgcggcgctacctgagggactcaggctcaatccgtgtcagccgttcaatgcgtgatctggcttataaagctatgcaggcaagagaaaaacttaccaatgataattctaaagagcctacgattgagcagatagccaaagaaatagacgc

SEQ ID NO: 34396 - DNA, 109 bp, Unknown
  Description of Unknown: RightRegion for integrase B8397 sequence
aaaataattgataaaatttatattaaagaaggcaaaataaaagaagttacttttttgtaacttctttttatgtaaattaattgttcatatcttcaggcgcttctactgg

SEQ ID NO: 34397 - DNA, 109 bp, Unknown
  Description of Unknown: RightRegion for integrase B8398 sequence
aacaccttcactctaaaaagttcggatattgagtcctcagctccaccaagtccactgtaatttcggttacagtggcttttttattatgccgataaaaaacaaaaggacc

SEQ ID NO: 34398 - DNA, 260 bp, Unknown
  Description of Unknown: RightRegion for integrase B8399 sequence
attaaaaatattgtggtttatccagatggaaatttgaaaataaattttttaggatattgattttatttgcactaataaatactaaccagatggatgattatgagctaatagtatgcgagcagaagaatatttaaccgcttcccgaaaaatttcgcgtggatgagcaatactaataaacaaaactatatacctaaaatattacatttatacaaatcgatagacaacacgaacatatattcggtataattatattactagga

SEQ ID NO: 34399 - DNA, 260 bp, Unknown
  Description of Unknown: RightRegion for integrase B8400 sequence
atttgcataaaagagattattatcaacaaagatgcgattgatatagtttacaatttttagaaaggagacttttttcaccctccatatgtcattcctatgataatgggcgaattgcggcgctacctgagggactcaggctcaatccgtgttagccgttcaatgcgtgatctcgcttataaagctatgcaggcaagagaaaaacttaccaatgataattctaaagagcctacgattgagcagatagccaaagaaatagacgc

SEQ ID NO: 34400 - DNA, 260 bp, Unknown
  Description of Unknown: RightRegion for integrase B8401 sequence
ataatatctaaaattgttattgtcaatgacaacattgaaattcaactgaagaatttttagcagtaactatacgctgtgccaatagcatatagttagtgcaaatgccgtatttatcgcattttttaacccttgaaaattgaatatctgaacttgatgtcgcttttatgtcgcttatgtgtcgctttaagcggctttttttatgccaaaatttaagcataaggaggacggaaatctatgttttcagatgaaattttagagaa

SEQ ID NO: 34401 - DNA, 260 bp, Unknown
  Description of Unknown: RightRegion for integrase B8402 sequence
aaagaaatccatgtagacccggaaacccgcaagataagcggcttccggctgaatgcctgatgggtgtagtaacttatattactctactgtgaagtccccctgcccgccggaaaatgctgctgccgtggaaccaaaatcgatgctctggtcgatggaaaggtcttcggtcggatctatgttgtgctgctttaaaatatattcaaataccatttccggcatgccaccagccctgccgcccagcacttttttgcccttcagca

SEQ ID NO: 34402 - DNA, 260 bp, Unknown
  Description of Unknown: RightRegion for integrase B8403 sequence
aaagaaatccgttttgacgaaaatacccataagataagcgggtttaaatttttgatttagaggtgtagtattctatataactcagttgagtttgaacccggcgccactaatctggaaaaagaaggcaaaggatatgtcgttgcctctctcggcaccgacagcggttatgtgccatataccgcattttccgcaaagcaaagttatatcgacaaaaacccggaaatcattcaaggctttacgaacgcactgcaaaaaggaat

SEQ ID NO: 34403 - DNA, 260 bp, Unknown; identical to SEQ ID NO: 34402
  Description of Unknown: RightRegion for integrase B8404 sequence

SEQ ID NO: 34404 - DNA, 223 bp, Unknown
  Description of Unknown: RightRegion for integrase B8405 sequence
attaaaaatattgtggtttatccagatggaaatttgaaaataaattttataggatattgattttatttgcactaacaaatactaaccagatggatgattatgagctaatagtatgcgagcagaagaatatttaaccgcttcccgaaaaatttcgcgtggatgagcaatactaataaacaaaaccatatacctaaaatattacatttatacaaatcgatagaca

SEQ ID NO: 34405 - DNA, 109 bp, Unknown
  Description of Unknown: RightRegion for integrase B8406 sequence
aaaataatagataaaatttatgttaaggatggtaaaataaaagaagttacttttttgtaacttctttctatgtattattgaacaattattcgttcgtttcctctggcgc

SEQ ID NO: 34406 - DNA, 260 bp, Unknown
  Description of Unknown: RightRegion for integrase B8407 sequence
tcatttataaataaaatatatgtagaaaatggcgaaattaaagagattacttttttgtaatctctttgcttattacattatatctctagcattgcaaggctttgcagttagttgttacttaattctggtgctccaactgggcaaacaccttcgcatgttccacatgagatacatgcatctttatttattatatatttatcatcaccttgtgaaatacaagaaactggacagctagctgcacatgctccacaactaataca

SEQ ID NO: 34407 - DNA, 260 bp, Unknown
  Description of Unknown: RightRegion for integrase B8408 sequence
atttgcataaaagagattattatcaataaagatgcaattgatatagtttacaatttttagaaaggagacctttttcaccctccatatatcattccgatagcgtatggagggtgaaaaggcactgttactgcgaaatgacaagatacgaagcgattgaaagagcaatagaaattataagcgaaaaagaaggcgttgaaactaaagccgaaatattgaaaaatttggaaaaagtgaaaatacttctaaagaacgaatggact

SEQ ID NO: 34408 - DNA, 109 bp, Unknown
  Description of Unknown: RightRegion for integrase B8409 sequence
aaaataattgataaaatctatattaaagaaggaaaaataaaagaagttacttttttgtaacttctttttatgtaaattaattgttcatatcttctggagcttcaactgg

SEQ ID NO: 34409 - DNA, 260 bp, Unknown
  Description of Unknown: RightRegion for integrase B8410 sequence
attaaaaatattgtggtttatccagatggaaatttgaaaataaactttataggatattgattttatttgcactaacaaatactaaccagatggatgattatgagctaatagtatgcgagcagaagaatatttaaccgcttcccgaaaaatttcgcgtggatgagcaatactttgattcagtgatcctttgaaaatcgttttctgttggataatgtcattcttggtattcaagtaaatacaaattaaatgttcttgttgca

SEQ ID NO: 34410 - DNA, 143 bp, Unknown
  Description of Unknown: RightRegion for integrase B8411 sequence
tccatcatcgaggaaatccggctagatgataacaagatatcccgaatcatttttaagtgattttttcgcgggattttgtcaggactaacttacctgtctcggtagtgttagggtagttagtccccgaattaaacagaccgtca

SEQ ID NO: 34411 - DNA, 260 bp, Unknown
  Description of Unknown: RightRegion for integrase B8412 sequence
aaagaaatccatgtagacccggaaacccgcaagataagcggcttccagctgaatgcctgatgggtgtagtaacttatattactctaccgtatattataaattactacacctatagaattacgaaatatttttaacaggttttacctcccagacctgcgtaatcattcccgcagcctgtagctgtttctggaatgcctggcactccgccgctgtattgcaaaaaccggcaaccgcagcataaagtgtaccggatacctgca

SEQ ID NO: 34412 - DNA, 109 bp, Unknown; identical to SEQ ID NO: 34396
  Description of Unknown: RightRegion for integrase B8413 sequence

SEQ ID NO: 34413 - DNA, 260 bp, Unknown
  Description of Unknown: RightRegion for integrase B8414 sequence
ataatatctaaaattgttattgtcaatgacaacattgaaattcagttgaagaatttttagcagtaactatacgctgtgccaatagcatatagttagtgcaaacgccgtatttatcgcattttttaacactcgaaaattgaatatctgaacttgatgtcgcttttgtgtcgcttatgtgtcgcgttaagcggctttttttatgccaaaatttaagcataaggaggacggcaatctatgttttcagatgaaattttagagaa

SEQ ID NO: 34414 - DNA, 260 bp, Unknown
  Description of Unknown: RightRegion for integrase B8415 sequence
agagttgtgaggagaatcgagatcaagcgtcactcagtcgacaaggtgtactttgtttaaatttttgtgcaatttttttgtacttactttttgctattatgtcaccttgtcacttgtcatggtaacataatagcaataaaatattaaataatatcaatatatcacacaatgtatgatatatttatcactatacaagtcatacattgtatgatattatatagacataacaaagaaaggaaaccacaaagagtggttaaggt

SEQ ID NO: 34415 - DNA, 260 bp, Unknown
  Description of Unknown: RightRegion for integrase B8416 sequence
aaagaaatccgttttgacgaaaatacccataagataagcgggtttaaatttttgatttagaggtgtagtattttatataactcagttgagtttgaacccggcgctactaatctggaaaaagagggcaaaggatatgtcgttgcctctctcggcaccgacagcggttatgtgccatataccgcattttccgcaaagcaaagttatatcgacaaaaacccggaaatcattcaaggctttacgaacgcactgcaaaaaggaat

SEQ ID NO: 34416 - DNA, 109 bp, Unknown; identical to SEQ ID NO: 34396
  Description of Unknown: RightRegion for integrase B8417 sequence

SEQ ID NO: 34417 - DNA, 260 bp, Unknown; identical to SEQ ID NO: 34402
  Description of Unknown: RightRegion for integrase B8418 sequence

SEQ ID NO: 34418 - DNA, 260 bp, Unknown
  Description of Unknown: RightRegion for integrase B8419 sequence
aaagaaatccatgtagacccggaaacccgcaagataagcggcttccggctgaatgcctgatgggtgtagtaacttatattactctactgtgaaatccccctgtccgccggaaaatgctgctgccgtggaaccaaaatcgatgctctggtcgatggaaagatcttcggtcggatcaatgttgtactgctttaaaatatattcaaataccatttccggcatgccgcctgtcgccatcactacaatgtaaatatttgtccgat

SEQ ID NO: 34419 - DNA, 260 bp, Unknown
  Description of Unknown: RightRegion for integrase B8420 sequence
ataatatctaaaattgttattgccaatgacaacattgaaattcagttgaagaatttttagcagtaactatacgtcgttccaatggcatatagttagtgcaaacgccgtatttatcgcattttttaacacctaaaaattgaatatctgaacttgatgtcgcttttatgtcgcttatgtgtcgctttaagcggctttttttatgccaaaatttaagcataaggaggacggaaatctatgttttcagatgaaattttagagaa

SEQ ID NO: 34420 - DNA, 260 bp, Unknown
  Description of Unknown: RightRegion for integrase B8421 sequence
attatagaaacgattgagattaaaagcaaaaacgaattcgagattaactttttaatttagtgtactaacttggaataacctggtggcttctccggggtagatagccctctttttttcagtaatccaacatcgacagaaagagctttagcagatcgagtaattagaggagaatactatcatcccgctaccaacgctttatggttttatgcacctgctagaggaaccaattgtgcatctacatggtgggatcaaacactagc

SEQ ID NO: 34421 - DNA, 260 bp, Unknown
  Description of Unknown: RightRegion for integrase B8422 sequence
ataatatctaaaattgttattgccaatgacaacattgaaattcagttgaagaatttttagcagtaactatacgctgtgccaatgataattggggagattaggagatacctccgggacaacagccagataagagtatcgcgttcacttaaagatacggcatataaggcgatttatgccaaagagcgccttatgaaacaaagccagaaagagccgacgattaatgaaattgccgctgaaataggtgtggacaaagaagaaat

SEQ ID NO: 34422 - DNA, 260 bp, Unknown
  Description of Unknown: RightRegion for integrase B8423 sequence
atttgcataaaagagattattatcaacaaagatgcgattgatatagtttacaatttttagaaaggagacttttttcaccatccatatgtcattcctatgataatgggcgaattgcggcgctacctgagggactcaggctcaatccgtgtcagccgttcaatgcgtgatctggcttataaagctatgcaggcaagagaaaaacttaccaatgataattctaaagagcctacgattgagcagatagccaaagaaatcgacgc

SEQ ID NO: 34423 - DNA, 260 bp, Unknown
  Description of Unknown: RightRegion for integrase B8424 sequence
tcatttataaataaaatatatgtagaaaatggcgaaattaaagagattacttttttgtaatctctttgcttattacattgtatctctagcattgcaaggctttgcagttagttgttacttaattctggtgcgccaactgggcaaacaccttcgcatgttccacatgagatacatacatctttatttattatatatttgtcatcaccttgtgaaatacaagaaactggacagctagctgcacatgctccacaactaataca

SEQ ID NO: 34424 - DNA, 260 bp, Unknown
  Description of Unknown: RightRegion for integrase B8425 sequence
acgatagtcgttctgccttacggtttcgtacttgcgacccagattaaggataggctttgagcctgtcctttttcttttggtagtcggtagtccgttttaacgaattttccttatatatacatgtaatgcgagggagcgacgagattgcgccttgagtccctttactttttggaaaaatctttttagtttttacgaactaccagtactaccagatagccaaaggccttgcaaatcaaggactttcttcggtagcaggctca

SEQ ID NO: 34425 - DNA, 260 bp, Unknown
  Description of Unknown: RightRegion for integrase B8426 sequence
gaaaagattgtaattgtcaatggaaatgttgaaattcaattgaagaatttttttcactgactatatatcatacctatgattattagcttgtgaaaatgccgtgtttatcatactttcaagagttgtcaaaatcagagtgtcgcttaaatgtcgtttttaagacgtttgaagcgtctttttttttgccaaaatttaggtacaaggagggcatgatatgttttcggatgaaatacttgaaaagatttttggacgagaagatg

SEQ ID NO: 34426 - DNA, 260 bp, Unknown
  Description of Unknown: RightRegion for integrase B8427 sequence
ataatatcaaaaataattatagtcaatggaaatattgaaatacagttgaaaaaattttagcataaactatatgccatcggagtcgcattatgtaagtgctaataacaaatgcgccgtacatatcatgtaaattgacataaaatagaatatttgatagtatatatcatatactaacgatgacaccgatccgagaatgaggattctgtgtcttttttgttttcaggaggaattttcatgattgcacagggaatcagtcttcc

SEQ ID NO: 34427 - DNA, 260 bp, Unknown
  Description of Unknown: RightRegion for integrase B8428 sequence
ataatagacaagataattatagtcaacggaaatgtggaaattcaattaaagaatttttagcacctactatacgccgtgggtatggcatatagtacgttctgatacgccgtatttactacactttttaatataataatttatttcgatgtcgctaaagtgtcatatatttgtcgctttaagcgtctttttttatgcaaaaattaaatcataaaggagtgaggctttatgtttacagacgagattttaaccaaaatattttc

SEQ ID NO: 34428 - DNA, 260 bp, Unknown
  Description of Unknown: RightRegion for integrase B8429 sequence
tcttttatcgatgttataagtattgatggaaattataatattgacattaaatttttataattttttttacacatttgcttgtactaagttactatcaccaccaggttaatgttatttagtacaagcactaaaatagaaagaagtacagtaaaaattatttgtacttctttctttatactattataatattattagatagttttttcggttctgttggccttattactatctggagcatttactgttgcagcagtagatgc

SEQ ID NO: 34429 - DNA, 260 bp, Unknown
  Description of Unknown: RightRegion for integrase B8430 sequence
ataatatcaaaaataattatagtcaatggaaatattgaaatacagttaaaaaaattttagcataaactatatgccataggagtcgcattatgtaagtgctaataataaatgcgccgtacatatcatgtaaattgacataaaatagaatatttgatagtatatattgtatactaacgatgacaccgatctgagaatgaggattctgtgtctttttttattttctggaggaattttcatgattgcacagggaatcagccata

SEQ ID NO: 34430 - DNA, 260 bp, Unknown
  Description of Unknown: RightRegion for integrase B8431 sequence
ataatatcaaaaataattatagtcaatggaaatattgaaatacagttaaaaaaattttagcataaactatatgccataggaactgcattatgtaagtgctaataagtgccgcacgtatcatgtcaataaataacaggagggtaacgatgatctcacagggaattagtcataccgcatatgatgtaatgagagaatacatgattataggagcagaactggacgaactgccagaaaatcagcgtataaaatagttcgcaaat

SEQ ID NO: 34431 - DNA, 260 bp, Unknown
  Description of Unknown: RightRegion for integrase B8432 sequence
ataatatcgaaaattgttattgtcaagggtaacgtggagatacagttaaaagaattttagcagtagctaataatcattggacttgcatatagcgaatgctaatgccgtgtttatcatgttttttaaaaatggaaaattggaatttgtcgctaaattgacgttttgaggtcgcttttggcggctttttttatgccagaatagaatcagaaggagggataacctatgttttctgacgaaattttggaaaaaatatttatcag

SEQ ID NO: 34432 - DNA, 260 bp, Unknown
  Description of Unknown: RightRegion for integrase B8433 sequence
ataatagacaaaatagttatagtcaatggaaatgtggaaattcaattaaagaatttttagcacgtcctatatgctgtgcctatggcatataggacatactgatacgccgtatttactacactttttaattaaataatttatttaaatgtcgctaaagtgtcatatatttgtcgctttgagcgtctttttttatgtcaaaattaaattataaaggagtgatgctttatgtttacagatgaaatattaacaaagatattttc

SEQ ID NO: 34433 - DNA, 260 bp, Unknown
  Description of Unknown: RightRegion for integrase B8434 sequence
ataatatcaaaaataattatagtcaatggaaatattgaaatacagttaaagaaattttagcacaaactatatgccataggaactgcattatgtaagtgctaataatgccgcacgtatcatgttaataaataacaggagggtaacgatgatctcacaaggaattagtcataccgcatatgatgtaatgagagaatacatgattataggagcagaactggacggaaaatatcagataccgatgttagatagatacacagggc

SEQ ID NO: 34434 - DNA, 260 bp, Unknown
  Description of Unknown: RightRegion for integrase B8435 sequence
ataatatcaaaaataattatagtcaatggaaatattgaaatacagttaaaaaaattttagcataaactatatgccataggagtcgcattatgtaagtgctaataatgccgcacgtatcatgttaataaataacaggagggtaacgatgatctcacaaggaattagtcataccgcatatgatgtaatgagagaatacatgattataggagcagaactggacggaaaatatcagataccgatgttagatagatacacagggc

SEQ ID NO: 34435 - DNA, 260 bp, Unknown; identical to SEQ ID NO: 34429
  Description of Unknown: RightRegion for integrase B8436 sequence

SEQ ID NO: 34436 - DNA, 260 bp, Unknown
  Description of Unknown: RightRegion for integrase B8437 sequence
ataatctcaaaaattgtgatagtcaatggaaatgttgaaatacagttaaagagattttagcataacctatacgccatacctacggcatatagttagtgctaataagtgtcgcacgtatcatgtcaataaataacaggaggataacgatgatctcacagggaattagccataccgcatatgacgtaatgcgagagtacatgattacaggagccgaactggacggcaaataccaaattccaatgatggaacgatacacagac

SEQ ID NO: 34437 - DNA, 260 bp, Unknown; identical to SEQ ID NO: 34436
  Description of Unknown: RightRegion for integrase B8438 sequence

SEQ ID NO: 34438 - DNA, 260 bp, Unknown
  Description of Unknown: RightRegion for integrase B8439 sequence
ataatatcaaaaataattatagtcaatggaaatattgaaatacagttaaagaaattttagcacaaactatatgccataggagtcgcattatgtaagtgctaataataaatgcgccgtacatatcatgtaaattgacataaaatagaatatttgatagtatatattgtatactaacgatgacaccgatctgagaatgaggattctgtgtctttttttattttcgggagaaattttcatgattgcacagggaatcagccata

SEQ ID NO: 34439 - DNA, 260 bp, Unknown
  Description of Unknown: RightRegion for integrase B8440 sequence
ataatatcgaaaattgttattgtcaagggtaacgtggagatacagttaaaagaattttagcagtagctaataatcattggtcttgcatatagcgaatgctaatgccgtgtttatcgtgtttttttaaaatgggaaattggaatttgtcgctaaattgacgttttgaagtcgcttttagcggctttttttatgccagaataaaatcagaaggagggataacatatgttttctgacgaaattttggaaaaaatatttatcag

SEQ ID NO: 34440 - DNA, 260 bp, Unknown
  Description of Unknown: RightRegion for integrase B8441 sequence
ataatagacaagataattatagtcaacggaaatgtggaaattcaattaaagaatttttagcacctactatacgccgtgggtacagcgtaggtactgaatttgacatccagtgtctgatcgaaattatccagtgctttgatcagcccgatgcagccgacctgaaaaaggtcatcggagctttcgatgttgttgccggagaaccgttggatcacactcagaacaagtcggaggtttccacggataaattcttctctggcact

SEQ ID NO: 34441 - DNA, 260 bp, Unknown
  Description of Unknown: RightRegion for integrase B8442 sequence
ataatctcaaaaattgtgatagtcaatgggaatgttgaaatacagttaaagagattttagcataacctatacgccatccctatggcatatagttagtgctaataagtgtcgcacgtatcatgtcaataaataacaggaggataacgatgatctcacagggaattagccataccgcatatgatgtaatgcgagagtacatgattacaggagccgaactggacggcaaataccaaattccgataatggaacgatacacagac

SEQ ID NO: 34442 - DNA, 260 bp, Unknown
  Description of Unknown: RightRegion for integrase B8443 sequence
ataatatcaaaaataattatagtcaatggaaatattgaaatacagttgaagaaattttagcacaaactatatgccataggaactgcattatgtaagtgctaataaatgccgcacgtatcatgtcaataaataacaggagggtaacgatgatctcacagggaattagtcataccgcatatgatgtaatgagagaatacatgattataggagcagaactggacgaactgccagaaaatcagcgtataaaatagttcgcaaat

SEQ ID NO: 34443 - DNA, 260 bp, Unknown
  Description of Unknown: RightRegion for integrase B8444 sequence
ataatatcaaaaataattatagtcaatggaaatattgaaatacagttaaagaaattttagcacaaactatatgccataggagtcgcattatgtaagtgctaataataaatgcgccgtacatatcatgtaaattgacataaaatagaatatttgatagtatatattgtatactaacgatgacaccgatctgagaatgaggattctgtgtctttttttattttcgggaggaattttcatgattgcacagggaatcagccata

SEQ ID NO: 34444 - DNA, 260 bp, Unknown
  Description of Unknown: RightRegion for integrase B8445 sequence
ataattgataagattgttatagtcaatggaaacatagaaatacaattaaagaatttttagcacatactatacgctgtgcctacggcggtatgctagtgctaatgccgtatttatcgtactttttacaattaaataaaatcaaactgtcgtttttgtgtcgttaaactgtcgtttttctgtcgctttaagcggctttttttatgtgaaaataaaattacaaaaaggagagtgattgaagtgtacgacgaagatttaagaga

SEQ ID NO: 34445 - DNA, 260 bp, Unknown
  Description of Unknown: RightRegion for integrase B8446 sequence
ataatatctaagattgtaattgtcaataatgatattgaaatacaattaaaaaacttttagaacgtaacgccataacgatggcattgcgtagagatatactgttagcagaagcatagtgcaagacctatggcgaatagtctctgctaatttgatgccgcatatatcacggttttaagccatttttgaaaaatgaatgtcgctaaagtgtcgcttttatgtcactattagcgtctttttttatgcaaaaatttatacataag

SEQ ID NO: 34446 - DNA, 260 bp, Unknown
  Description of Unknown: RightRegion for integrase B8447 sequence
ataatatcaaaaataattatagtcaatggaaatattgaaatacagttaaaaaatttttagcataaactatatgccataggaactgcattatgtaagtgctaataagtgccgcacgtatcatgtcaataaataacaggagggtaacgatgatctcacagggaattagtcataccgcatatgatgtaatgagagaatacatgattataggagcagaactggacggactggcagaaaaacagcgtgtaaaaatggttcacaaa

SEQ ID NO: 34447 - DNA, 260 bp, Unknown; identical to SEQ ID NO: 34433
  Description of Unknown: RightRegion for integrase B8448 sequence

SEQ ID NO: 34448 - DNA, 260 bp, Unknown; identical to SEQ ID NO: 34443
  Description of Unknown: RightRegion for integrase B8449 sequence

SEQ ID NO: 34449 - DNA, 260 bp, Unknown
  Description of Unknown: RightRegion for integrase B8450 sequence
ataatatcaaaaataattatagtcaatggaaatattgaaatacagttgaagaaattttagcacaaactatatgccataggagtcgcattatgtaagtgctaataacaaatgcgccgtacatatcatgaaattgacataaaatagaatatttgatagtatatattgtatactaacgatgacaccgatccgagaataaggattctgtgtcttttttgttttcaggaggaattttcatgattgcacagggaatcagtcatacc

SEQ ID NO: 34450 - DNA, 260 bp, Unknown; identical to SEQ ID NO: 34443
  Description of Unknown: RightRegion for integrase B8451 sequence

SEQ ID NO: 34451 - DNA, 260 bp, Unknown
  Description of Unknown: RightRegion for integrase B8452 sequence
ataatatctaagattgtaattgtcaataatgatattgaaatacaattaaaaaacttttagaacgtaacgccataacgatggcattgcgtagagatatactgttagcagaagcatagcgcaagacctatgattatcggtgagatccggcgttttttacgggataacagcagtatccgtgtcagcagatccttaaaggataccgcctataaagccatatatgccaaagaaaccatgatgaaacaggggatgagggagccgac

SEQ ID NO: 34452 - DNA, 260 bp, Unknown
  Description of Unknown: RightRegion for integrase B8453 sequence
attatcaaagagatttacataaacgataagcgggagattgtgcggatagtttttttataacttttgttggactaagtactacgctcccgttggagcgtataacttagtacaactaaaaaagcccgctttcgcaggctcatgatttatattttcattcatcgaacgatagaagaaattcttctacgtcttctatcgttcccagctccaccggatcttcctgcgggttaaatccgtaccagaagattccttctttttcgtaa

SEQ ID NO: 34453 - DNA, 260 bp, Unknown
  Description of Unknown: RightRegion for integrase B8454 sequence
ataatatcaaaaataattatagtcaatggaaatattgaaatacagttgaagaaattttagcacaaactatatgccataggagtcgcattatgtaagtgctaataataaatgcgccgtacatatcatgtaaattgacataaaatagaatatttgatagtatatattgtatactaacgatgacaccgatctgagaatgaggattctgtgtctttttttattttctggaggaattttcatgattgcacagggaatcagccata

SEQ ID NO: 34454 - DNA, 260 bp, Unknown; identical to SEQ ID NO: 34431
  Description of Unknown: RightRegion for integrase B8455 sequence

SEQ ID NO: 34455 - DNA, 260 bp, Unknown
  Description of Unknown: RightRegion for integrase B8456 sequence
ataatctcaaaaattgtgatagtcaatggaaatgttgaaatacagttaaagagattttagcataacctatacgccatacctacggcatacagttagtgctaatgagtgtcgcacatatcatgtcaataaataacaggagggtaacgatgatctcacagggaattagccataccgcatatgatgtaatgcgagagtacatgattacaggagccgaactggacggcaaataccaaattccgatgatggaacgatatacagac

SEQ ID NO: 34456 - DNA, 260 bp, Unknown
  Description of Unknown: RightRegion for integrase B8457 sequence
ataatagataaaattgttatagtcaatggaaatatcgaaatacagttaaagaatttttagcacttactatatgcagttcctatgacataatgttagtgctaatgccgtatttatcacgttttacaattatataattttagtgctgtcgcttatatgtcgtacatatgtctatcatatgtcgctttaagcgtctttttttatgccaaaatataatcagaaagagaggtaatgcggatgttttctgatgaagttagagaaaa

SEQ ID NO: 34457 - DNA, 260 bp, Unknown
  Description of Unknown: RightRegion for integrase B8458 sequence
ataatagacaagataattatagtcaatggtaatgttgaaattcagttaaagaatttttagcacctagtacatatcataggagtcgcaggcagtaggtactgaagtgccgtatttactacactttttaaacaaaatacttttttgaatgtcgccaatgtgtcatgaatgtgccactttgagcgtctttttttatgcaaaaatctaagcataaggagtggttctcatgttttcagatgaaatcctagaaaaaatttattcaa

SEQ ID NO: 34458 - DNA, 260 bp, Unknown; identical to SEQ ID NO: 34443
  Description of Unknown: RightRegion for integrase B8459 sequence

SEQ ID NO: 34459 - DNA, 260 bp, Unknown
  Description of Unknown: RightRegion for integrase B8460 sequence
ataatagacaagataattatagtcaatggaaatgtagaaattcaattaaagaatttttagcacctactatacgccgtgggtatggcatatagtacgtactgatacgccgtatttactacactttttaatataataatttattttgatgtcgctaaagtgtcatatatttgtcgcttttagcgtctttttttatgcaaaaattaaatcataaaggagtgatgatctatgtttacggacgagattttaacaaaaatattttc

SEQ ID NO: 34460 - DNA, 260 bp, Unknown
  Description of Unknown: RightRegion for integrase B8461 sequence
ataatagataaaattgttatagtcaatggaaatatcgaaatacagttaaagaatttttagcacttactatatgcagttccaatgattactggggagattaagaggtatcttcgtgataacagtgcaataagagtaagccgttcattaaaggatatggcttataaggcactttatacaaaagaacagctattaaagagcaggcagaaggaaccgacaatatcggagattgcaagtgagataggagcatctaaggaggatat

SEQ ID NO: 34461 - DNA, 260 bp, Unknown; identical to SEQ ID NO: 34433
  Description of Unknown: RightRegion for integrase B8462 sequence

SEQ ID NO: 34462 - DNA, 260 bp, Unknown
  Description of Unknown: RightRegion for integrase B8463 sequence
ataatatcaaaaataattatagtcaatggaaatattgaaatacagttgaagaaattttagcacaaactatatgccataggagtcgcattatgtaagtgctaataatgccgcacgtatcatgttaataaataacaggagggtaacgatgatctcacaaggaattagtcataccgcatatgatgtaatgagagaatacatgattataggagcagaactggacggaaaatatcagataccgatgttagatagatacacagggc

SEQ ID NO: 34463 - DNA, 260 bp, Unknown; identical to SEQ ID NO: 34429
  Description of Unknown: RightRegion for integrase B8464 sequence

SEQ ID NO: 34464 - DNA, 260 bp, Unknown
  Description of Unknown: RightRegion for integrase B8465 sequence
attatcaaagagatttacataaacgataagcgggagattgtgcggatagtttttttataacttttgttggactaagcactacgctcccgtcggtgcatggtagttagtacaaaaaagagcggtgactccgctctaaattctctatttataatatccagggcattcacattctgcataaatccatgtcccggggatttctttaacgtcaaacgtgaaatctaaacacccgtcagcgatgtcaatttcccatccggtgatgg

SEQ ID NO: 34465 - DNA, 260 bp, Unknown
  Description of Unknown: RightRegion for integrase B8466 sequence
ctcaaaataaaagaaatccggctatacaaagaccgccggattgaatttgattttctgtaagtacttagtttatataaaccttttcccaaggtgcggtataccgagcgtccggacgtggccacggcgtgtatcatggagggcgatgtggtggtgctggtggacaattcagcgtcggccctgctgctgcccacaacgatcctgcggttcaacgaggagatcaacgactactacttcccgcccctcatcggcacgtatctgca

SEQ ID NO: 34466 - DNA, 260 bp, Unknown
  Description of Unknown: RightRegion for integrase B8467 sequence
ataatatcaaaaataattatagtcaatggaaatattgaaatacagttaaaaaaattttagcataaactatatgccataggagtcgcattatgtaagtgctaataacaaatgtgccgtacatatcatgtaaattgacataaaatagaatatttgatagtatatattgtatgctaacgatgacaccgatctgagaatgaggattctgtgtctttttttattttcgggaggaattttcatgattgcacagggaatcagccata

SEQ ID NO: 34467 - DNA, 260 bp, Unknown
  Description of Unknown: RightRegion for integrase B8468 sequence
ataatatctaagattgtaattgtcaataatgatattgaaatacaattaaaaaacttttagaacgtaacgccataacgatggcattgcgtagagatatactgttagcagaagcatagcgcaagacctatggcgaatagtctctgctaattttatgccgcatatatcacggttttaagccatttttgaaaaatgaatgtcgctaaagtgtcgcttttatgtcactattagcgtctttttttatgcaaaaatttatacataag

SEQ ID NO: 34468 - DNA, 260 bp, Unknown
  Description of Unknown: RightRegion for integrase B8469 sequence
ataatctcaaaaattgtgatagtcaatggaaatgttgaaatacagttaaagagattttagcataacctatacgccatacctacggcatatagttagtgctaataagtgtcgcacgtatcatgtcaataaataacaggaggtaacgatgatctcacagggaattagccataccgcatacgatgtaatgcgagagtacatgattacaggagccgaactggacggcaaataccaaattccaatgatggaacgatacacagacc

SEQ ID NO: 34469 - DNA, 109 bp, Unknown
  Description of Unknown: RightRegion for integrase B8470 sequence
attcaagaaatatatttcgatgaaaacaataaactgagtggctttaaattccttatctagccactcaggctatatttgtttacggtgtagtaatctttataacacaacg

SEQ ID NO: 34470 - DNA, 260 bp, Unknown; identical to SEQ ID NO: 34462
  Description of Unknown: RightRegion for integrase B8471 sequence

SEQ ID NO: 34471 - DNA, 260 bp, Unknown
  Description of Unknown: RightRegion for integrase B8472 sequence
ataatagacaaaatagttatagtcaacggaaatgtggaaattcaattaaagaatttttagcacctactatacgccgtgggtatgacatatagtacgtactgatacgccgtatttactacacttttaatataatatactttgattcaatgtcgctaaagtgtcatatatttgtcgctttgagcgtctttttttatgtaaaaattaaatcataaaggagtgatgctctatgtttacagatgagattttaacaaaaatatttg

SEQ ID NO: 34472 - DNA, 260 bp, Unknown
  Description of Unknown: RightRegion for integrase B8473 sequence
ataatctcaaaaattgtgatagtcaatggaaatgttgaaatacagttaaagagattttagcataacctatacgccatacctacggcatatagttagtgctaataagtgtcgcacgtatcatgttaataaataacaggaggataacgatgatctcacagggaattagccataccgcatatgacgtaatgcgagagtacatgattacaggagccgaactggacggcaaataccaaattccaatgatggaacgatacacagac

SEQ ID NO: 34473 - DNA, 260 bp, Unknown
  Description of Unknown: RightRegion for integrase B8474 sequence
ataatctcaaaaattgtgatagtcaatggtaacgttgaaatacagttaaagagattttagcataacctgtatgccatacctacggcatatagttagtgctaatgagtgtcgcacgtatcatgtcaataaacaacaggaggataacgatgatctcacagggaattagccataccgcatatgatgtaatgcgagagtacatgattacaggagccgaactggacggcaaataccaaattccgatgatggaacgatatacagac

SEQ ID NO: 34474 - DNA, 260 bp, Unknown; identical to SEQ ID NO: 34440
  Description of Unknown: RightRegion for integrase B8475 sequence

SEQ ID NO: 34475 - DNA, 260 bp, Unknown
  Description of Unknown: RightRegion for integrase B8476 sequence
ataatatcaaaaataattatagtcaatggaaatattgaaatacagttaaaaaaattttagcataaactatatgccatcggagtcgcattatgtaagtgctaataatgccgcacgtatcatgttaataaataacaggagggtaacgatgatctcacaaggaattagtcataccgcatatgatgtaatgagagaatacatgattataggagcagaactggacggaaaatatcagataccgatgttagatagatacacagggc

SEQ ID NO: 34476 - DNA, 260 bp, Unknown
  Description of Unknown: RightRegion for integrase B8477 sequence
ataatatctaagattgtaattgtcaataatgatattgaaatacaattaaaaaacttttagaacgtaacgccataacgatggcattgcgtagagatatactgttagcagaagcataacgcaagacctatggcgaatagtctctgctaatttgatgccgcatatatcacggttttaagccatttttgaaaaatgaatgtcgctaaagtgtcgcttttatgtcactattagcgtctttttttatgcaaaaatttatacataag

SEQ ID NO: 34477 - DNA, 260 bp, Unknown
  Description of Unknown: RightRegion for integrase B8478 sequence
ataatctcaaaaattgtgatagtcaatggaaatgttgaaatacagttaaagagattttagcataacctatacgccataccaatgatcattggagagatgaaacgcttcttccgggatgacgggatgataaaggtaagccgggctataaaggaatgtagacacagagtctatcaggcacgggagaaaattgagagagaatccgggcgggagccgacgatccaggaactttcggaaacacttggaattgcggcggaagaagt

SEQ ID NO: 34478 - DNA, 260 bp, Unknown; identical to SEQ ID NO: 34440
  Description of Unknown: RightRegion for integrase B8479 sequence

SEQ ID NO: 34479 - DNA, 260 bp, Unknown
  Description of Unknown: RightRegion for integrase B8480 sequence
ataatatcgaaaattgttattgtcaagggtaacgtggagatacagttaaaagaattttagcagtagctaataatcattggacttgcatatagcgaatgctaatgccgtgtttatcgtgtttttttaaaatgggaaattggaatttgtcgctaaattgacgttttgaagtcgcttttagcggctttttttatgccagaataaaatcagaaggagggataacatatgttttctgacgaaattttggaaaaaatatttatcag

SEQ ID NO: 34480 - DNA, 260 bp, Unknown
  Description of Unknown: RightRegion for integrase B8481 sequence
ataatctcaaaaattgtgatagtcaatggaaatgttgaaatacagttaaagagattttagcataacctatacgccataccaatgatcattggagagatgaaacgcttcttccgggatgacgggatgataaaggtaagccgggctataaaggaatgtagacacagagtctatcaggcacgggagaaaattgagagagaatccgggcgggagccgacgatccaggaactttcggaaacactcggaatcgcggcggaagaagt

SEQ ID NO: 34481 - DNA, 260 bp, Unknown
  Description of Unknown: RightRegion for integrase B8482 sequence
ataatagacaaaatagttatagtcaacggaaatgtggaaattcaattaaagaatttttagcacctactatacgccgtgggtatggcatatagtacgtactgatacgccgtatttactacacttttaatataataaacttgattcaatgtcgctaaagtgtcatatatttgtcgctttgagcgtctttttttatgccaaaattaaatcataaaggagtgatactttatgtttacaagcgaaattttaacaaaaatatttgc

SEQ ID NO: 34482 - DNA, 260 bp, Unknown
  Description of Unknown: RightRegion for integrase B8483 sequence
ataatatcaaaaataattatagtcaatggaaatattgaaatacagttgaaaaaattttagcacaaactatatgccatcggagtcgcattatgtaagtgctaataacgaatgcgccgtacatatcatgtaaattgacataaaatagaatatttgatagtatatatcatatactgacgatgacaccgatccgagaatgaggattctgtgtctttttttattttcgggaggaattttcatgattgcacagggaatcagccata

SEQ ID NO: 34483 - DNA, 260 bp, Unknown
  Description of Unknown: RightRegion for integrase B8484 sequence
aatacgctcactatctcgagttcggatattgagcgcacagctccattttggaacatctaaaaaagctgatgattatccatattcggataatcaccagcttttctttttatactatttcatcgactatatttattcagccattcttttctgaaccagttcaaattcatccgtgatttctttggaaggtgccttagtcgcaagacttaccagcacgatcatcgcgcaggataccaggaaagccggaagtaattcatagaaat

SEQ ID NO: 34484 - DNA, 260 bp, Unknown
  Description of Unknown: RightRegion for integrase B8485 sequence
ataatatcaaaaataattatagtcaatggaaatattgaaatacagttgaagaaattttagcataaactatatgtcataggaactgcattatgtaagtgctaataagtgccgcacatatcatgttaacaaataacaggagggaaatgatgatctcacagggaattagtcataccgcatatgatgtaatgagagaatacatgattataggagcagaactggacggaaaatatcagataccgatgttagatagatatacaggg

SEQ ID NO: 34485 - DNA, 260 bp, Unknown
  Description of Unknown: RightRegion for integrase B8486 sequence
ataatctcaaaaattgtgatagtcaatggaaatgttgaaatacagttaaagagattttagcataacctatacgccatccctacggcatatagttagtgctaataagtgtcgcacgtatcatgtcaataaataacaggagggtaacgatgatctcacagggaattagccataccgcatatgatgtaatgcgagagtacatgattacaggagccgaactggacggcaaataccaaattccaatgatggaacgatacacagac

SEQ ID NO: 34486 - DNA, 260 bp, Unknown; identical to SEQ ID NO: 34479
  Description of Unknown: RightRegion for integrase B8487 sequence

SEQ ID NO: 34487 - DNA, 260 bp, Unknown
  Description of Unknown: RightRegion for integrase B8488 sequence
ataatatcgaaaattgttattgtcaagggtaacgtggagatacagttaaaagaattttagcagtagctaataatcattggaacagcataagttgaaaaccgtactcccagttcggtattgaaatggtcgattgccttgatcagaccgatacagccaatctgaaatagatcgtctacgttttcccctgcagaggaaaagcgtcggatgacgctcaaaacgagccgcagatttcccttgataaactgttcccgtgcctcggc

SEQ ID NO: 34488 - DNA, 260 bp, Unknown
  Description of Unknown: RightRegion for integrase B8489 sequence
atcattaaaaagatcgttattactaatgaaaacgtcaatattttattaaatgaattatgattgcagaaatataaactccatgcacatagaattaatatttctgcaatcaaaaagtccctggggcatacgtcccagggccgtcttttatacttgtactttctgatatcgcttcagcaaaataaaagcataatcgttttggctgggcggtgtatccagcatctctggtactcttttcagagtgcgtcgggaaccatttccga

SEQ ID NO: 34489 - DNA, 260 bp, Unknown
  Description of Unknown: RightRegion for integrase B8490 sequence
ataattgataagattgttatagtcaatggaaacatagaaatacaattaaagaatttttagcacatactatatgctgtgccaatggcgttaagttagtgctaatgccgtgtttatcgtactttttacaattaaataaaatcaaggtgtcgtttttgtgtcgttaaactgtcgtttttctgtcgctttaagcggctttttttatgtgaaaataaaattacaaaaaggagagtgattgaagtgtacgacgaagatttgagaga

SEQ ID NO: 34490 - DNA, 260 bp, Unknown
  Description of Unknown: RightRegion for integrase B8491 sequence
ataatatcgaaaattgttattgtcaagggtaacgtggagatacagttaaaagaattttagcagtagctaataatcattgggacagcataagttgaaaaccgtactcccagttcggtattgaaatggtcgattgccttgatcagaccgatacagccaatctgaaatagatcgtctacgttttcccctgcagaggaaaagcgtcggatgacgctcaaaacgagccgcagatttcccttgataaactgttcccgtgcctcggc

SEQ ID NO: 34491 - DNA, 260 bp, Unknown
  Description of Unknown: RightRegion for integrase B8492 sequence
ataatatcaaaaataattatagtcaatgggaatattgaaatacagttaaagaaattttagcacaaactatatgccatcgggactgcatatgtcgagaatttgacattcagtgtatcgtcaaaattatcgacggctttcataagaccaatgcacccgatctgaaaaagatcatcggcattttcattgctgttctgaaatcgtttgataacacttaacacaaggcggagatttcctttgatatattgttcgcgggcttcaga

SEQ ID NO: 34492 - DNA, 260 bp, Unknown
  Description of Unknown: RightRegion for integrase B8493 sequence
ataatagataagattattatagtcaatggaaatatcgaaatacaattaaagaatttttagcagaaacttaatgccattggcatggcatataggaagtgctaatgccgcatttatcacgtttttataattgcataattttaataatgtcgcttatgtgtcatatatatgtctattatatgtcgctatgagcgtctttttttatgccaaaatataatcagaaagagaggtagtgtaaatgttttctgatgaagttagagaaa

SEQ ID NO: 34493 - DNA, 260 bp, Unknown
  Description of Unknown: RightRegion for integrase B8494 sequence
ataattgataaggtgattgtaggcaaggacgatatagaaattcagctaaaaaacttttagcacttacataatgcagttcctatggcgttaaggtggtgctataccgcatatacactacattctttttgacacaagacgcataatgcgtcttttttattgctattttttaggctatatgttatgttgaatgtgtacttaggaggtatattgatgattgatatatctaagctgataaaggctgaatatgagtacataagatt

SEQ ID NO: 34494 - DNA, 132 bp, Unknown
  Description of Unknown: RightRegion for integrase B8495 sequence
ataatatcaaggattgtgattgtcaatggagatgttgaaattcaattaaagaatttttagcagaacctattgttataggaaccgcataggtagagaacttcacacccagagtagcgtcgaaattgtcaatgg

SEQ ID NO: 34495 - DNA, 109 bp, Unknown
  Description of Unknown: RightRegion for integrase B8496 sequence
ataatatcaaggattgtaattgtcaatggtgatgtcgaaattcaattaaagaatttttagcagaacctattgttatcggaaccgcataggtagagaacttcacacccag

SEQ ID NO: 34496 - DNA, 80 bp, Unknown
  Description of Unknown: RightRegion for integrase B8497 sequence
ataatagataaagttattatagtcaatggaaatgttgaaattcagttaaagaatttttagcatatacttaatgctacggg

SEQ ID NO: 34497 - DNA, 260 bp, Unknown
  Description of Unknown: RightRegion for integrase B8498 sequence
ataattgacaagatagtaattgtcaatgggaatattgaaatacagcttaagaatttttagcataaacttaatgcagttcctatagcatataggaagtgctaatgccgcatttatcacgttttacaattatataatttcagcattgtcgcttatatgtcgcacatatgtctattatgtgtcgctataagtgattttttttatgcaaaaatgtaactagaaagagaggtaatgtgaatgttttctgatgaagttagagaaaa

SEQ ID NO: 34498 - DNA, 260 bp, Unknown
  Description of Unknown: RightRegion for integrase B8499 sequence
attatagaccgtatcacaattgatgatgataatgtcaatatcaaactaaaacatctatgatttaatttgcaagttttcaaatactatgtgtatgggattcggatgcaacgcagcgggcattgtgggatgccgtatcattgattcccccagagaacggcttattgccatgataaccaacaactttgtgccatgcaacggaaggtttccgccaccatacaaagggaaacaaaaatgttcctcggcgctgacaatgaagaaac

SEQ ID NO: 34499 - DNA, 260 bp, Unknown
  Description of Unknown: RightRegion for integrase B8500 sequence
ataatagataagattgttatagtcaatggaaatattgaaatacagttaaagaatttttagcagaaacttaatgccatgggcatggcatataggaagtgctaatgccacatttatcacattttaataattgcataattttaacaatgtcgtttatatgtcgtacacatgtctattatgtgtcgctataagcgtctttttttatgtcaaaattaagtcagaaagagaggtaatgtgaatgttttctgatgaagttagagaaa

SEQ ID NO: 34500 - DNA, 260 bp, Unknown
  Description of Unknown: RightRegion for integrase B8501 sequence
ataatagacaaaattgttatagtcaatggaaatatcgaaattcaattaaaaaatttttagcacaaacttaatgctgtgcccatgataattggggagataagacgttttttgagagataacagccagatacgggtgtcgaggtcgcttaaagatgtggcattcagggcaatatatgccaaagaaagaattatgaaaacagggaaggatgaacccacggttaatgaacttgccacggaaataggtgtaagcaaagaagaact

SEQ ID NO: 34501 - DNA, 260 bp, Unknown
  Description of Unknown: RightRegion for integrase B8502 sequence
ctccgcggctttccgggcaagtggtgctttgcgcgcacgcaaaaggcggcgtctccgtgaatacggagacgccgcccgcggctgtcaaaaagtattactttttgacaaagggggtttgcggcctgactgcagcgcacgcgccgtccgcccaagacggacggcgcgcacgtttgcaggccgagaagtattttctcagccgcacatgtcgcctgagaaaatgatccgactttctttcgccgctccggcggcgaaactctacg

SEQ ID NO: 34502 - DNA, 79 bp, Unknown
  Description of Unknown: RightRegion for integrase B8503 sequence
ataatagataggattgttatagtcaatggaaatattgaaatacagttaaagaatttttagcagaaacttaatgccatgg

SEQ ID NO: 34503 - DNA, 260 bp, Unknown
  Description of Unknown: RightRegion for integrase B8504 sequence
ataatatcaaggattgtgattgtcaatggtgatgttgaaattcaattaaagaatttttagcagaacatattgttattggagtggcaataggatgtgctaatgccgtatttatcatacttttaaaactgcatattttttcgtttgtcgcaaaagtgtcgtatatgtgtcactatatgcgactttttttatgccaaaatttaatcataaggagggatgaccttatgggaaaattcaaattttcagatgaaacactggaacat

SEQ ID NO: 34504 - DNA, 260 bp, Unknown
  Description of Unknown: RightRegion for integrase B8505 sequence
ataattgaaaaaatagtaattagcaatggaaatattgagataaaattgaaagatttttagcactactataatgctatcctatggtatatatttactgctaatataggtatattaatttagcagtaaaatagtaccatacccatggcatggggttagtgctaatgcgcatatttactacacttttgagtcattatagtggcaattattagtcgctattaatggctctttttgttttatgataattacaaagggaggaataa

SEQ ID NO: 34505 - DNA, 260 bp, Unknown
  Description of Unknown: RightRegion for integrase B8506 sequence
ataatagacaaaattgttatagtcaatggaaatatcgaaattcaattaaaaaatttttagcacaaacttaatgccgtgcctatggcatatgggaagtgctaatgccgtatttatcacgtttttacaactgcataattttaaaaatgtcgcttatgtgtcatatatgtgtctattatatgtcgctataagcgtctttttttatgcaaaaatacagtcagaaagagaggtaatgcgaatgttttctgatgaagttagagaga

SEQ ID NO: 34506 - DNA, 260 bp, Unknown
  Description of Unknown: RightRegion for integrase B8507 sequence
ataatagacaaaattgttatagtcaatggaaatatcgaaattcaattaaaaaatttttagcacaaacttaatgccgtgcctatggcatataggaagcgctaatgccgtatttatcacgttttaacaactgcataattttaaaaatgtcgcttatgtgtcatatatgtgtctattatatgtcgctataagcgtctttttttatgccaaaattaagctagaaagagaggtagtgcgaatgttttctgatgaagttagagaaa

SEQ ID NO: 34507 - DNA, 260 bp, Unknown
  Description of Unknown: RightRegion for integrase B8508 sequence
ataatagataaagttattatagtcaatggaaatgttgaaattcagttaaagaatttttagcatatacttaatgctacgggtattgcgttaaagaagtgctaatgccgtatttatcacgatttttaaacatgaattatttgaatatgtcgctaaagtgtcgttttgatgtcgcttttagcgtctttttttatgccaaaatgtaattgtaaggaggaagcgcttatgttttcagacgaagttttagagaagatttttgcaag

SEQ ID NO: 34508 - DNA, 260 bp, Unknown
  Description of Unknown: RightRegion for integrase B8509 sequence
attatagaccgtatcacaattgatgatgataatgtcaatatcaaactaaaacatctatgatttaatttacaagttttcaaatactatgtgtatagaatttataaacttgtaaactgattctttcttattcaaatatgatttatatatctacaccgatacaagatacttacaggaaatatataccagttgtggaaatcccatacagtgatataataagctcaagggagctgatacatatgaaggtaataccagaaatgcgt

SEQ ID NO: 34509 - DNA, 131 bp, Unknown
  Description of Unknown: RightRegion for integrase B8510 sequence
ataatatcaaggattgtgattgtcaatggtgatgttgaaattcaattaaagaatttttagcagaacctattgttatcggagtggcaataggatgtgctaatgccgtatttatcatacttttaaaacttcat

SEQ ID NO: 34510 - DNA, 260 bp, Unknown
  Description of Unknown: RightRegion for integrase B8511 sequence
ataattgataaagtgattgtaggcaaggatgatatagaaattcaattaaaaaacttttagcacctacataatgcagttcctatgataataggggaatgtaggagatatctgagagacaataatgcgataagggtgtcacgttccctccgcgatatagcgtacaaagcgatatacgcgaaggagaatctgcaaaagactagggataaggaacctacgatagaagagatagcggaggagataagtatacctaaggaagatat

SEQ ID NO: 34511 - DNA, 260 bp, Unknown
  Description of Unknown: RightRegion for integrase B8512 sequence
ataattgaaaaaatcgtaattagcaatggaaatattgagataaaattgaaagatttttagcactactataatgctatccaatggtatatatttactgctaatataggtatattaatttagcagtaaaatagtaccatacctacggcattgggttagtgctaatgcgcatatttactacatttttgagtcattatagtggcaattattagtcgctattaatggctctttttgttttatgataattacaaagggaggaataa

SEQ ID NO: 34512 - DNA, 260 bp, Unknown
  Description of Unknown: RightRegion for integrase B8513 sequence
ataatagataggattgttatagtcaatggaaatattgaaatacagttaaagaatttttagcagaaacttaatgccatgggcatggcatataggaagtgctaatgccgtatttatcacgttttacaattatataatttcaatgctgtcgcttatatgtcgtacatatgtctattatgtgtcgctttaagcgtctttttttatgcaaaaatgtaatcagaaagagaggtaatgtaaatgttttctgatgaagttagagaaaa

SEQ ID NO: 34513 - DNA, 260 bp, Unknown
  Description of Unknown: RightRegion for integrase B8514 sequence
ataattgacaagataatcattgtcaatggcaatattgagatacagttaaagaatttttagcacttactgtatgcggttcctatggcggtatgctagtgctaatgccgtatttatcgcgttttttcaaagaaggaaattggatatttgtcgcttttatgtcgccaagctgtcgctttaggcggctttttttatgccaaaatataagcaaaaggagggataaccgatgttgtcagataaggtaattgagaagattttcgcga

SEQ ID NO: 34514 - DNA, 260 bp, Unknown
  Description of Unknown: RightRegion for integrase B8515 sequence
ataattgataaggtgattgtaggcaaggacgatatagaaattcagctaaaaaacttttagcacttacataatgcagttcctatgattataggtgagtgcagaaggtatctcagagataacaatgctataagagtatcaaggtcattgcgtgatatagcctacaaggcgatatatgccaaggaaaatctccagaagacaaaggataaggagccgacgatagaggagatagcggaggagataagtataccgaaggaagatat

SEQ ID NO: 34515 - DNA, 260 bp, Unknown
  Description of Unknown: RightRegion for integrase B8516 sequence
attatagaccgcatcataattgatgatgataatgtcaatatcaagctaaagcaactataatctaatttacaagtttactaacaccatgtgtatgggattcggatgcaacgcagcgggcattgtgggatgccgtatcattgattcccccagagaacggcttattgccatgataaccaacaactttgtgccatgcaacggaaggtttccgccaccatacaaagggaaacaaaattgttcctcggcgctgacaatgaagaaac

SEQ ID NO: 34516 - DNA, 260 bp, Unknown
  Description of Unknown: RightRegion for integrase B8517 sequence
ataattgaaaaaatcgtaattagcaatggaaatattgagataaaattgaaagatttttagcactactataatgctatccaatggtatatatttactgctaatataggtatattaatttagcagtaaaatagtaccatacctgcggtattgggttagtgctaatgcgcatatttactacacttttgagtcattatagtggcaattattagtcgctattaatggctctttttgttttatgataattacaaagggaggaataa

SEQ ID NO: 34517 - DNA, 260 bp, Unknown
  Description of Unknown: RightRegion for integrase B8518 sequence
ataattgacaagatagtaattgtcaatggaaatattgaaatacagcttaagaatttttagcacaaacttaatgcagttcctatagcatataggaagtgctaatgccgcatttatcgcgttttacaattatataatttcagcattgccgcttatatgtcgcacatatgtctattatgtgtcgctataagtgattttttttatgcaaaaatgtaactagaaagagaggtagtgcaaatgttttctgatgaagtaagagaaaa

SEQ ID NO: 34518 - DNA, 260 bp, Unknown
  Description of Unknown: RightRegion for integrase B8519 sequence
ataatatcaaggattgtgattgtcaatggtgatgttgaaattcaattaaaaaatttttagcagaacctattgttatcggagtggcaataggatgtgctaatgccgtatttatcatacttttaaaactgcatattttttcgtttgtcgcaaaagtgtcgtatatgtgtcactatatgcgactttttttatgccaaaatttaagcataaggagggatgaccttatgggaaaattcaaattttctgatgaaacactggaacat

SEQ ID NO: 34519 - DNA, 131 bp, Unknown
  Description of Unknown: RightRegion for integrase B8520 sequence
ataatatcaaggattgtgattgtcaatggtgatgttgaaattcaattaaagaatttttagcagaacctattgttatcggagtggcaataggatgtgctaatgccgtatttatcatacttttaaaactgcat

SEQ ID NO: 34520 - DNA, 260 bp, Unknown
  Description of Unknown: RightRegion for integrase B8521 sequence
attatagaccgtatcacaattgatgatgataatgtcaatatcaaactaaaacatctatgatttaatttgcaagttttcaaatactatgtgtatagagtttataaacttgcaaattatttcttccttatttaaatgcagtatttatgatttattcgattctccatataaataatacttaggcgggcccggtcacatccggtacccgcttttatcatttctaaaatccataaatatttatcaatccctcttgaatttgcgcc

SEQ ID NO: 34521 - DNA, 260 bp, Unknown
  Description of Unknown: RightRegion for integrase B8522 sequence
ataatagacaaaattgttatagtcaatggaaatatcgaaattcaattaaaaaatttttagcacaaacttaatgccgtgcctatggcatataggaagtgctaatgccgtatttatcacgtttttacaactgcataattttaaaaatgtcgcttatgtgtcatatatgtgtctattatatgtcgctataagcgtctttttttatgtcaaaattaagatagaaagagaggtagtgcgaatgttttctgatgaagttagagaaa

SEQ ID NO: 34522 - DNA, 260 bp, Unknown
  Description of Unknown: RightRegion for integrase B8523 sequence
ataattgacaagatagtaattgtcaatggaaatattgaaatacagcttaagaatttttagcacaaacttaatgcagttccaatgattactggggagattaagaggtatcttcgtgataacagtgcaataagagtaagccgttcattaaaggatatggcttataaggcactttatacaaaagaacagctattaaagagcaggcagaaggaaccgacaatatcggagattgcaagtgagataggagcatctaaggaggatat

SEQ ID NO: 34523 - DNA, 182 bp, Unknown
  Description of Unknown: RightRegion for integrase B8524 sequence
attatagaccgtatcataattgatgatgataatgtcaatatcaaactaaaacagctataatttagtttacaagttttctaataccatgtgtatgggattcggatgcaacgcagcgggcattgtgggctgccgtatcattgattcccccagagaacggcttattgccatgataaccaacaact

SEQ ID NO: 34524 - DNA, 260 bp, Unknown
  Description of Unknown: RightRegion for integrase B8525 sequence
ataatagacaaaattgttatagtcaatggaaatattgaaattcaattaaaaaatttttagcacaaacttaatgctgtgcccatgataattggggagataagacgttttttgagggataacagccagatacgggtgtcgaggtcgcttaaagatgtggcattcagggcaatatatgccaaagaaagaattatgaaaacagggaaggatgaacccacggttaatgaacttgccacggaaataggtgtaagcaaagaagaact

SEQ ID NO: 34525 - DNA, 260 bp, Unknown
  Description of Unknown: RightRegion for integrase B8526 sequence
ataattgaaaaaatcgtaattagcaatggaaatattgagataaaattgaaagatttttagcactacaataatgctattctatggtatatatttactgctaatataggtatattgatttagcagtaaaatagtaccatacccatggcatgtggttagtgctaatgcgcatatttactacacttttgagtcactataatggcatttatttgtcacttatagtggctttttttattttatgcttattacaaagggaggaataa

SEQ ID NO: 34526 - DNA, 84 bp, Unknown
  Description of Unknown: RightRegion for integrase B8527 sequence
ataattgataaggtaattgtaggcaaggacgatatagaaattcagctaaaaaacttttagcacttacataatgcagttcctatg

SEQ ID NO: 34527 - DNA, 260 bp, Unknown
  Description of Unknown: RightRegion for integrase B8528 sequence
ataattgacaagataatcattgtcaatggcaatattgagatacagttaaagaatttttagcacttactgtatgccatgcctacggcggtatgctagtgctaatgctgtatttatcgcgttttttcaaagggaaaattgaacatttgtcgcttttatgtcgccaagctgtcgctttaggcggctttttttatgccaaaatataagcaaaaggagggataaccgatgttgtcagataaggtgattgagaagattttcgcgaa

SEQ ID NO: 34528 - DNA, 260 bp, Unknown
  Description of Unknown: RightRegion for integrase B8529 sequence
ataatatcaaggattgtgattgtcaatggtgatgttgaaattcaattaaagaatttttagcagaacctattgttatcggagtggcaataggatgtgctaatgccgtatttatcatacttttaaaactgaatatttttttgcttgtcgcaaaagtgtcgtatatgtgtcactatatgcgactttttttatgcaaaaatttaatcataaggagggatgaccttatgggaaaattcaaattttcagatgaaacactggaacat

SEQ ID NO: 34529 - DNA, 260 bp, Unknown
  Description of Unknown: RightRegion for integrase B8530 sequence
ctccgcggctttctgggcaagtggtgctttgcgcgcacgcaaaaggcggcgtctccgtgaatacggagacaccgcctgacgctgtcaaaaaagtgctctgagaattaattgttgcgttttccgtcaggagcgcctatacttgtacgtagaacgtcacgaaggaatctgacctgcggatttttcccgtatgagtcggttatgtcctttgtgacgtttccattttcattccgtcactggcaatccgcccagccggagagcac

SEQ ID NO: 34530 - DNA, 260 bp, Unknown
  Description of Unknown: RightRegion for integrase B8531 sequence
ataatatcaaggattgtgattgtcaatggtgatgttgaaattcaattaaagaatttttagcagaacctattgttatcggagtggcaataggatgtgctaatgccgtatttatcatacttttaaaactgcatattttttcgcttgtcgcaaaagtgtcgtatatgtgtcactatatgcgactttttttatgccaaaatttaatcataaggagggatgaccttatgggaaaattcaaattttctgatgaaacactggaacat

SEQ ID NO: 34531 - DNA, 260 bp, Unknown; identical to SEQ ID NO: 34513
  Description of Unknown: RightRegion for integrase B8532 sequence

SEQ ID NO: 34532 - DNA, 260 bp, Unknown
  Description of Unknown: RightRegion for integrase B8533 sequence
ataattgacaagataatcattgtcaacggaaacattgagatacagttaaaaagtttttagcacttactgtatgccatgcctatggcagtatgctagtgctaatgccgtatttatcgcgtttttttcaaaaaggaaaataaaatatttgtcgcttttatgtcgccaagttgtcactttaggtggctttttttatgccaaaatataaacaaaaggagggataacagatgttgtcggacaaagtgaaagaaaagctttttgca

SEQ ID NO: 34533 - DNA, 260 bp, Unknown
  Description of Unknown: RightRegion for integrase B8534 sequence
ataattgacaagatagtaattgtcaatggaaatattgaaatacagcttaagaatttttagcacaaacttaatgcagttcctatagcatataggaagtgctaatgccgcatttatcgcgttttacaattatataatttcagcattgtcgcttatatgtcgcacatatgtctattatgtgtcgctataagtgattttttttatgcaaaaatgtaactagaaagagaggtagtgcaaatgttttctgatgaagtaagagaaaa

SEQ ID NO: 34534 - DNA, 260 bp, Unknown
  Description of Unknown: RightRegion for integrase B8535 sequence
ataatctctaaagtagtagttgtcaacggaaacgttgacattcaattaaaatctttttagcataaccttattaccgtccgatggttggcggatatgctaagtgccatatttcctatatgtcccaaatattaatgtcataagtgtgtcggaattatgtcttttgaatgtcgctataagcgactttttttgtgcgaaaatacaaaatagataggaggtacgacctatgttttcggatgatctattaactattatattctcag

SEQ ID NO: 34535 - DNA, 260 bp, Unknown
  Description of Unknown: RightRegion for integrase B8536 sequence
attatagaccgtatcataattgatgatgataatgtcaatatcaaactaaaacagctataatttagtttacaagttttctaataccatgtgtatgggattcggatgcaacgcagcgggcatcgtgggctgccgcatcattgattctcccagggagcggctcattgccatgataaccaacaactttgtgccctgcaacggaaggtttcccaccctcatcgccattatctccatgttttttgtgggcgtatccggaggtgcct

SEQ ID NO: 34536 - DNA, 260 bp, Unknown
  Description of Unknown: RightRegion for integrase B8537 sequence
ataattgataagattgttatagtcaatggaaacatagaaatacaattgaagaatttttagcacttactatatgctgttccgatggcattaagttagtgctaataccgtgtttatcgtactttttacaattaaataaaatcaaactgtcgtttttgtgtcgttaaactgtcgtttttctgtcgctttaagcggctttttttatgtgaaaataaaattacaaaaaggagagtgattgaagtgtacgacgaagatttaagaga

SEQ ID NO: 34537 - DNA, 260 bp, Unknown
  Description of Unknown: RightRegion for integrase B8538 sequence
ataattgataaggtgattgtaggcaaggacgatatagaaattcagctaaaaaacttttagcacttacataatgcagttcctatggcattaaggtggtgctataccgcatatacactacattctttttgacacatgacgcattatgtgtcttttttattgctattttttaggctatatgttatgttgattgtgtacttaggaggtatattgatgattgatatatctaagctgataaaggctgaatatgagtacataagatt

SEQ ID NO: 34538 - DNA, 260 bp, Unknown
  Description of Unknown: RightRegion for integrase B8539 sequence
ataatatcaaggattgtgattgtcaatggtgatgttgaaattcaattaaagaatttttagcagaacctattgttatcggagtggcaataggatgtgctaatgccgtatttatcatacttttaaaactgcatatttttttgcttgtcgcaaaagtgtcgtatatgtgtcactatatgcgactttttttatgccaaaatttaagcataaggagggatgaccttatgggaaaattcaaattttcagatgaaacactggaacat

SEQ ID NO: 34539 - DNA, 260 bp, Unknown
  Description of Unknown: RightRegion for integrase B8540 sequence
ataattgataaagttattgtaggcaaggacgatatagaaattcagctaaaaaacttttagcacttacataatgcagttcctatgatcataggtgagtgcagaaggtatctcagagataacaatgctataagagtatcaaggtcattgcgtgatatagcctacaaggcgatatatgccaaggaaaatctccagaagacaaaggataaggagccgacgatagaggagatagcggaggagataagtataccaaaggaagatat

SEQ ID NO: 34540 - DNA, 260 bp, Unknown
  Description of Unknown: RightRegion for integrase B8541 sequence
ataattgataaggtgattgtaggcaaggacgatatagaaattcagctaaaaaacttttagcacttacataatgcagttcctatgatcataggtgagtgcagaaggtatctcagagataacaatgctataagagtatcaaggtcattgcgtgatatagcctacaaggcgatatatgccaaggaaaatctccagaagacaaaggataaggagccgacgatagaggagatagcggaggagataagtataccgaaggaagatat

SEQ ID NO: 34541 - DNA, 260 bp, Unknown; identical to SEQ ID NO: 34507
  Description of Unknown: RightRegion for integrase B8542 sequence

SEQ ID NO: 34542 - DNA, 80 bp, Unknown
  Description of Unknown: RightRegion for integrase B8543 sequence
ataattgacaagatagtaattgtcaatggaaatattgaaatacagcttaagaatttttagcataaacttaatgcagttcc

SEQ ID NO: 34543 - DNA, 260 bp, Unknown
  Description of Unknown: RightRegion for integrase B8544 sequence
atagtagagaaaatcgtaatagtcaatggagatgtagaaattgtattaaagaacttttagcacagacatactgcacgtccgatggcggtagtttatgctaaacgccgtatttcctgtgtttgcgaatagtggttgtcgcttatgtggcatgattttgacgctgagagcgtctttttttgtgcgaaaattcaaataaaggggtggtgatatgttttcagatgtgcttttagaaaaaatattttgtgacgaaagaatgagac

SEQ ID NO: 34544 - DNA, 260 bp, Unknown
  Description of Unknown: RightRegion for integrase B8545 sequence
ataattgacaagatagtaattgtcaatggaaatattgaaatacagcttaagaatttttagcataaacttaatgcagttcctatagcatataggaagtgctaatgccgcatttatcgcgttttacaattatataatttcagcattgtcgcttatatgtcgcacatatgtctattatgtgtcgctataagtgattttttttatgcaaaaatgtaactagaaagagaggtagtgcaaatgttttctgatgaagtaagagaaaa

SEQ ID NO: 34545 - DNA, 260 bp, Unknown
  Description of Unknown: RightRegion for integrase B8546 sequence
atagtagagaaaatcgtaatagtcaatggagatgtagaaattgtattaaagaacttttagcacagacatactgcacgtccgatggctgtagtttatgctaaacgccgtatttcctgtgtttgcgaatagtggttgtcgcttatgtggcatgattttgacgctgagagcgtctttttttatgcgaaaattcaaataaaggggtggtgatatgttttcagatgcgcttttagaaaaaatattttgtgacgaaagaatgagac

SEQ ID NO: 34546 - DNA, 260 bp, Unknown
  Description of Unknown: RightRegion for integrase B8547 sequence
ataattgacaagatagtaattgtcaatggaaatattgaaatacagcttaagaatttttagcataaacttaatgcagttcctatagcatataggaagtgctaatgccgcatttatcacgttttacaattatataatttcagcattgtcgcttatatgtcgcacatatgtctattatgtgtcgctataagtgattttttttatgcaaaaatgtaactagaaagagaggtaatgcgaatgttttctgatgaagttagagaaaa

SEQ ID NO: 34547 - DNA, 260 bp, Unknown
  Description of Unknown: RightRegion for integrase B8548 sequence
ataattgataaagtgattgtaggcaaggacgatatagaaattcagttaaaaaacttttagcacctacataatacagttcctatgatcataggtgagtgcagaaggtatctcagagataacaatgctataagagtatcaaggtcattgcgtgatatagcctacaaggcgatatatgccaaggaaaatctccagaagacaaaggataaggagccgacgatagaggagatagcggaggagataagtataccgaaggaagatat

SEQ ID NO: 34548 - DNA, 260 bp, Unknown
  Description of Unknown: RightRegion for integrase B8549 sequence
ataatagacaaaattgttatagtcaatggaaatatcgaaattcaattaaaaaatttttagcacaaacttaatgctgcgcctatggcatataggaagtgctaatgccgtatttatcacgtttttacaactgcataattttaaaaatgtcgcttatgtgtcatatatgtgtctattatatgtcgctataagcgtctttttttatgccaaaattaagttagaaagagaggtagtgcgaatgttttctgatgaagttagagaaa

SEQ ID NO: 34549 - DNA, 260 bp, Unknown
  Description of Unknown: RightRegion for integrase B8550 sequence
ataattgacaagataatcattgtcaacggaaatattgaaatacagttaaaaagtttttagcacttactgtatgccgtgcctatggcagcatgctagtgctaatgccgtatttatcgcgtttttcaaaaaggaaaataaaatatttgtcgcttttatgtcgccgagctgtcgctttgagcgactttttttatgtcaaaatataaacaaaaggagggatagcagatgctgtcggacaaagtgaaagaaaagctttttgcaaa

SEQ ID NO: 34550 - DNA, 260 bp, Unknown
  Description of Unknown: RightRegion for integrase B8551 sequence
ataatcaaaaaaatagtaattgtcaatggaaacattgaaattcagctgaaaaatttttagcacttactgcacgcagttcctatgacatatagtaggtgctaatgccgtatttatcacgttttttagtcaactataaaactgaatttaatcaaataatttatcaaataatggtttatctttgactttttcgcaaaaatgtgtataataatctatggaaagtgaggtaagtttatgaaacatataactggcagaagttatcc

SEQ ID NO: 34551 - DNA, 260 bp, Unknown
  Description of Unknown: RightRegion for integrase B8552 sequence
ataattgacaagataatcattgtcaacggaaatattgagatacaattaaagaatttttagcacttactgtatgcggtgccgatgatagccggcgagataaaaagatttttaagggatgacggaatgctcaaggtcagccgttcgctcaaggaaaatggatacaggataaagaaggcgtccgatgagctggtatcacagaacggaagggaggcaacgatagaggagcttgcggcagccacggagctgtcggttgaggatgt

SEQ ID NO: 34552 - DNA, 109 bp, Unknown
  Description of Unknown: RightRegion for integrase B8553 sequence
ataaaagaaatcttaattgaccctgagactcacgagctgaatggcataatatttttttagtttgttggtgtatcaaacatactaactcaaccgtgtaatcagcctctcc

SEQ ID NO: 34553 - DNA, 260 bp, Unknown
  Description of Unknown: RightRegion for integrase B8554 sequence
ataatagataaagttattatagtcaatggaaatgttgaaattcagttaaagaatttttagcatatacttaatgctacgggaacggcgtaggttgagaattgtacgccctgtgaaatatcaaaattatcaattgctttaatcatgccgacacagccaatctggaataaatcgtcaatattttcactgctttgtgaaaaacgctgaacaatgcttaaaacaaggcgcagatttccgttaataaaacgctcgcgtgcctgtgt

SEQ ID NO: 34554 - DNA, 260 bp, Unknown; identical to SEQ ID NO: 34535
  Description of Unknown: RightRegion for integrase B8555 sequence

SEQ ID NO: 34555 - DNA, 260 bp, Unknown
  Description of Unknown: RightRegion for integrase B8556 sequence
ataattgacaagatagtaattgtcaatggaaatattgaaatacagcttaagaatttttagcataaacttaatgcagttcctatagcatataggaagtgctaatgccgcatttatcacgttttacaattatataatttcagcattgtcgcttatatgtcgcacatatgtctattatgtgtcgctataagtgattttttttatgcaaaaatgtaattagaaagagaggtaatgcgaatgttttctgatgaagttagagaaaa

SEQ ID NO: 34556 - DNA, 260 bp, Unknown; identical to SEQ ID NO: 34533
  Description of Unknown: RightRegion for integrase B8557 sequence

SEQ ID NO: 34557 - DNA, 260 bp, Unknown
  Description of Unknown: RightRegion for integrase B8558 sequence
atagtagagaaaatcgtaatagtcaatggagatgtagaaattgtattaaagaacttttagcacagacatactgcacgtccgatgatcgttggagaaatccgtcgttatatgcgggataacaattccatccgtgttagcagatccctgcgagatacagcgtacaaagcgatttacgcaagggaaaattatatgaaacagtatcagaaagagccgaccgtgcaggaaattgcaaaagaagtaggcatatcgaaagaagatat

SEQ ID NO: 34558 - DNA, 260 bp, Unknown
  Description of Unknown: RightRegion for integrase B8559 sequence
ataattgacaagatagtaattgtcaatggaaatattgaaatacagcttaagaatttttagcataaacttaatgcagttccaatgattataggagagataaaaaggtacctgcgcgacaacagtgcaataagggtcagcagaagccttaaggatatggcatataaagccatatacacaaaggagcagctattaaagaagaagcagaaggagccgactatatcagagatagcaggtgagataggcgtatcaaaagaagagat

SEQ ID NO: 34559 - DNA, 260 bp, Unknown
  Description of Unknown: RightRegion for integrase B8560 sequence
ataatagataggattattatagtcaatggaaatattgaaatacagttaaagaatttttagcagaaacttaatgccattggcatggcatataggaagtgctaatgccgtatttatcacgttttacaattatataatttcaatgctgtcgcttatatgtcgtacacatgtctattatgtgtcgctttaagcgtctttttttatgcaaaaatgtaatcagaaagagaggtaatgcaaatgttttctgatgaagttagagaaaa

SEQ ID NO: 34560 - DNA, 260 bp, Unknown
  Description of Unknown: RightRegion for integrase B8561 sequence
ataatagataggattgttatagtcaatggaaatattgaaatacagttaaagaatttttagcagaaacttaatgccattggaactgcataagttgaaaactgtacaccctgtcctaagtcgaaattatctatggcttttattaatccaatacatccaatctggaataagtcatccatattttcgttactgttagagaatcttccaacaatgcttaggacaagtcgaagattacctttgatgaaagcttcacgtgcgctgtt

SEQ ID NO: 34561 - DNA, 260 bp, Unknown
  Description of Unknown: RightRegion for integrase B8562 sequence
ataattgataaggtgattgtaggcaaggacgatatagaaattcagctaaaaaacttttagcacttacataatgcagttcctatggcattaaggtggtgctataccgcatatacactacattctttttgacacatgacgcataatgcgtcttttttattgctattttttaggctgtatgttatgttgattgtgtacttaggaggtatattgatgattgatatatctaagctgataaaggctgaatatgagtacataagatt

SEQ ID NO: 34562 - DNA, 260 bp, Unknown
  Description of Unknown: RightRegion for integrase B8563 sequence
ataatagacaaaattgttatagtcaatggaaatatcgaaattcaattaaaaaatttttagcacaaacttaatgccgtgcctatggcatataggaagtgctaatgccgtatttatcacgtttttacaattacataattttaaaaatgtcgcttatgtgtcatatatgtgtctattatatgtcgctgtaagcgtctttttttatgtaaaaatataatcagaaagagaggtaatgagaatgttttctgatgaagtcagagaga

SEQ ID NO: 34563 - DNA, 124 bp, Unknown
  Description of Unknown: RightRegion for integrase B8564 sequence
gtaaaagaaatcatcgcatacccagacggtacgttttcatttgtgttgcgtaatatataatatgtgttgcctggtggtaatgcatgttatatattacagttgatttccatggcatgagtttttg

SEQ ID NO: 34564 - DNA, 260 bp, Unknown
  Description of Unknown: RightRegion for integrase B8565 sequence
ataatagaaaaagtagttattgtcaatggtgatattgaaatacagttaaaaacgttttagcgtcaaaaatagccgtaggtacggcatataggaagtgctaatgccgtatttatcatacataattttatcaaaaaaatccatgtcgcacaatagtctttataatgtcgcttttagcgactttttttgtgcaataattcatatataggagaaaaatcatgattatgaattttagcccatttgaatttgaaatattgaacgag

SEQ ID NO: 34565 - DNA, 260 bp, Unknown
  Description of Unknown: RightRegion for integrase B8566 sequence
ataatagataagattgttatagtcaatggaaatattgaaatacaattaaagaatttttagcagaaacttaatgccattggcatggcatataggaagtgctaatgccgtatttatcacgttttgcaattatataattttaatgttgtcgcttatatgtcgtacatatgtctatcacatgtcgctataagcgtctttttttatgccaaaatataatcagaaagagaggtaatgcgaatgttttctgatgaagttagagaaaa

SEQ ID NO: 34566 - DNA, 260 bp, Unknown
  Description of Unknown: RightRegion for integrase B8567 sequence
ataatatcaaggattgtgattgtcaatggtgatgttgaaattcaattaaagaatttttagcagaacctattgttatcggaaccgcgtaggtggaaaattttacacccagcgtggaatcaaaattgtcgatggccttgatcagaccgatacagccgatctggaacagatcgtccacattttccgcactgccggaaaagcgtttgatcacgctcaggaccagacgcaggttgccttcgatgtaggtctctctggcggcggta

SEQ ID NO: 34567 - DNA, 260 bp, Unknown
  Description of Unknown: RightRegion for integrase B8568 sequence
ataattgataaagtgattgtaggcaaggatgatatagaaattcagttaaagaacttttagcacctacataatgcagttcctatggcgttaaggtggtgctataccgcatatacactacattctttttgacacatgacgcataatgcgtctttttttattgccatttttaaaactgtgtgatatgttgagtgtgtacttaggaggtatattgatgattgatatatctaagctgataaaggctgaatatgagtacataagat

SEQ ID NO: 34568 - DNA, 128 bp, Unknown
  Description of Unknown: RightRegion for integrase B8569 sequence
ataattgacaagatagtaattgtcaatggaaatattgaaatacagcttaagaatttttagcacaaacttaatgcggttcctatagcatataggaagtgctaatgccgcatttatcgcgttttacaatt

SEQ ID NO: 34569 - DNA, 260 bp, Unknown; identical to SEQ ID NO: 34540
  Description of Unknown: RightRegion for integrase B8570 sequence

SEQ ID NO: 34570 - DNA, 260 bp, Unknown
  Description of Unknown: RightRegion for integrase B8571 sequence
ataatatcaaggattgtgattgtcaatggtgatgttgaaattcaattaaagaatttttagcagaacctattgttatcggagtggcaataggatgtgctaatgccgtatttatcatacttttaaaactgcatatttttttgcttgtcgcaaaagtgtcgtatatgtgtcactatatgcgactttttttatgccaaaatttaagcataaggagggatgaccttatgggaaaattcaaattttctgatgaaacactggaacat

SEQ ID NO: 34571 - DNA, 260 bp, Unknown
  Description of Unknown: RightRegion for integrase B8572 sequence
ataatagataaaatcgtaatagtcaatggaaatatcgaaattcagttaaaaaaattttagcataaacataatgccatgcctacggtattaagttagtgctaacgccgtatttatcactatttcaaaatacttaattttatagtatgtcgctaaaaagtcatttttttgtcgtttttggcgtctttttttatgcaaaaatttaatcaaaggagggaacggcagatgattacagacgcaatgcgagaacgtatttttggcaa

SEQ ID NO: 34572 - DNA, 260 bp, Unknown
  Description of Unknown: RightRegion for integrase B8573 sequence
ataatatcaaggattgtgattgtcaatggtgatgttgaaattcaattaaagaatttttagcagaacctattgttatcggcacagcataagtggaaaattttacaccaagtgtggagtcaaagttgtcaatggctttgatcagcccgatgcagccgatctggaacagatcatccacgttctccgcactgctcgaaaaacgtttgatcacacttaggaccagacgtaaatttccctcaatatagctctcgcgggcagcggta

SEQ ID NO: 34573 - DNA, 139 bp, Unknown
  Description of Unknown: RightRegion for integrase B8574 sequence
ataattgaaaaaatcgtaattagcaatggaaatattgagataaaattgaaagatttttagcactacaataatgctattctatggtatatatttactgctaatataggtatatttatttagcagtaaaatagtaccatac

SEQ ID NO: 34574 - DNA, 260 bp, Unknown
  Description of Unknown: RightRegion for integrase B8575 sequence
ataatagataaaatcgtaatagtcaatggaaatatcgaaattcagttaaaaaaattttagcataaacataatgccatgcccatgatcatgggggagataaagcggtttatgcgggatgacggaatgataaagatcagtcgtaccatgaaagagaacggatggaaaatcaaagtggcagcgcagcggctggggcaggagcttggacggcaggcgacggttgatgagattgcggctgcaaccgagctggcaccggaggagat

SEQ ID NO: 34575 - DNA, 260 bp, Unknown
  Description of Unknown: RightRegion for integrase B8576 sequence
attatagaccgtatcataattgatgatgataatgtcaatatcaaactaaaacagctataatttagtttacaagttttctaataccatgtgtatagagtttataaacttgcaaattatttcttccttatttaaatgcagtatttatgatttattcgattctccatataaataatacttaggcgggcccggtcacatccggtacccgcttttattaccactaaattctcaaaaaattatatcaattcctcttgacattacgc

SEQ ID NO: 34576 - DNA, 260 bp, Unknown
  Description of Unknown: RightRegion for integrase B8577 sequence
ataatatcaaggattgtgattgtcaatggtgatgttgaaattcaattaaagaatttttagcagaacctattgttatcggaatggcaataggatgtgctaatgccgtatttatcatacttttaaaactgcatattttttgtttgtcgcaaaagtgtcgtatatgtgtcactatatgcgactttttttatgccaaaatttaagcataaggaggaatgaccttatggcaaaattcagattttcagatgaagcactggaacata

SEQ ID NO: 34577 - DNA, 260 bp, Unknown
  Description of Unknown: RightRegion for integrase B8578 sequence
attataaaagagattaggcaactcggagaacccgaccattacgccattatttttttatagttattttttgtactaactgtatatcgccagttggtgctatatagttagtacaaaccataaaagcagggtttcccctgcttttatatctttttttccttttttaatttatattctattaactctaataaatactcattcggtacatatcttcccgctttccagtcttgtactgttctatacggtatattaaaatactcgct

SEQ ID NO: 34578 - DNA, 260 bp, Unknown
  Description of Unknown: RightRegion for integrase B8579 sequence
ataattgataaggtgattgtcgccaaggacgatatagaaattcagttaaaaaacttttagcacctacataatacagttcctatggcgttaaggtggtgctataccgcatatacactacattctttttgacacatgacgcataatgcgtctttttttattgccatttttaaagctatgtgatatgttgagtgtgtacttaggaggtatattgatgattgatatatctaagctgataaaggctgaatatgagtacataagat

SEQ ID NO: 34579 - DNA, 260 bp, Unknown
  Description of Unknown: RightRegion for integrase B8580 sequence
ataattgacaagataatcattgtcaacggaaatattgagatacaattaaagaatttttagcacttcctgtctgccatccctacggcggtatgctagtgctaatgccgtatttatcgcgttttttcaaagtggaaattgaatatttgtcgcttttatgtcgccaagctgtcgctttaggcggctttttttatgccaaaatataagcaaaaggagggataaccgatgttgtcagataaggtgattgagaagattttcgcgaa

SEQ ID NO: 34580 - DNA, 260 bp, Unknown
  Description of Unknown: RightRegion for integrase B8581 sequence
ataaaagaaatcttaattgaccctgagactcacgagctgaatggcataatatttttttagtttgttggtgtatcaaacatactaactcaaccgtgtaatcagcctctcccgagacaaatgctcctgacgtattggcgaaatcaatgttttgtacaaggttaatgtctttttgtggattcattccatgtttctttaaaacgtattcaaataccatttctggcataccacctggtcttccaccaatgacttttttacccttt

SEQ ID NO: 34581 - DNA, 260 bp, Unknown
  Description of Unknown: RightRegion for integrase B8582 sequence
tttgatacaaagcgtatcttaattgcggttcattttttatctctaaaaaacggcttgtaattagtatttacggcatttttgccgattagtaaagtgtcagagtgaaaaaaatacggctgttttgtaataaaaaaggcaaccgtttagtgtgtttttagagccgattttttattctgacacaaaactttttgaccgtttcatttttaaaaataagcgtttcatttttcaaaatcagaatttataacggatgtcctgttttt

SEQ ID NO: 34582 - DNA, 260 bp, Unknown
  Description of Unknown: RightRegion for integrase B8583 sequence
ataattgacaagatagtaattgtcaatggaattattgaaatacagcttaagaatttttagcataaacttaatgcagttcctataacatataggaagtgctaatgccgcatttatcacgttttacaattatataatttcagcattgtcgcttatatgtcgcacatatgtctattatgtgtcgctataagtgattttttttatgcaaaaatgtaactagaaagagaggtaatgcgaatgttttctgatgaagttagagaaaa

SEQ ID NO: 34583 - DNA, 260 bp, Unknown
  Description of Unknown: RightRegion for integrase B8584 sequence
ataattgataaagttattgtaggcaaggacgatatagaaattcagctaaaaaacttttagcacttacataatgcagttcctatgatcataggtgagtgtagaaggtatctcagagataacaatgctataagagtatcaaggtcattgcgtgatatagcctacaaggcgatatatgccaaggaaaatctccagaagacaaaggataaggagccgacgatagaggagatagcggaggagataagtataccgaaggaagatat

SEQ ID NO: 34584 - DNA, 260 bp, Unknown; identical to SEQ ID NO: 34540
  Description of Unknown: RightRegion for integrase B8585 sequence

SEQ ID NO: 34585 - DNA, 260 bp, Unknown
  Description of Unknown: RightRegion for integrase B8586 sequence
ataattgataaagtgattgtaggcaaggacgatatagaaattcagctaaaaaacttttagcacctacataatgcagttcctatgatcataggtgagtgcagaaggtatctcagagataacaatgctataagagtatcaaggtcattgcgtgatatagcctacaaggcgatatatgccaaggaaaatctccagaagacaaaggataaggagccgacgatagaggagatagcggaggagataagtataccgaaggaagatat

SEQ ID NO: 34586 - DNA, 260 bp, Unknown; identical to SEQ ID NO: 34566
  Description of Unknown: RightRegion for integrase B8587 sequence

SEQ ID NO: 34587 - DNA, 260 bp, Unknown
  Description of Unknown: RightRegion for integrase B8588 sequence
ataatatcaaggattgtgattgtcaatggtgatgttgaaattcaattaaagaatttttagcagaacctattgttatcggagtggcaataggatgtgctaatgccgtatttatcatacttttaaaactgaatatttttttgcttgtcgcaaaagtgtcgtatatgtgtcactatatgcgactttttttatgccaaaatttaagcataaggagggatgaccttatgggaaaattcaaattttcagatgaaacactggaacat

SEQ ID NO: 34588 - DNA, 260 bp, Unknown; identical to SEQ ID NO: 34507
  Description of Unknown: RightRegion for integrase B8589 sequence

SEQ ID NO: 34589 - DNA, 260 bp, Unknown
  Description of Unknown: RightRegion for integrase B8590 sequence
ataatatcaaggattgtgattgtcaatggtgatgttgaaattcaattaaagaatttttagcagaacctattgttattggagtggcaataggatgtgctaatgccgtatttatcatacttttaaaactgaatatttttttgcttgtcgcaaaagtgtcgtatatgtgtcactatatgcgactttttttatgcaaaaatttaatcataaggagggatgaccttatgggaaaattcaaattttcagatgaaacactggaacat

SEQ ID NO: 34590 - DNA, 260 bp, Unknown
  Description of Unknown: RightRegion for integrase B8591 sequence
ataattgacaaggtaatcattgtcaacggaaatattgagatacagttaaagaatttttagcacttcctgtctgccatccctacggcggtatgctagtgctaatgccgtatttatcgcgttttttcaaagtggaaattgaatatttgtcgcttttatgtcgccaagctgtcgctttaggcggctttttttatgccaaaatataagcaaaaggagggataaccgatgttgtcagataaggtgattgagaagattttcgcaaa

SEQ ID NO: 34591 - DNA, 260 bp, Unknown; identical to SEQ ID NO: 34566
  Description of Unknown: RightRegion for integrase B8592 sequence

SEQ ID NO: 34592 - DNA, 260 bp, Unknown
  Description of Unknown: RightRegion for integrase B8593 sequence
ataatatcaaggattgtgattgtcaatggtgatgttgaaattcaattaaagaatttttagcagaacctattgttatcggagtggcaataggatgtgctaatgccgtatttatcatacttttaaaactgcatattttttgtttgtcgcaaaagtgtcgtatatgtgtcactatatgcgactttttttatgccaaaatttaatcataaggagggatgaccttatgggaaaattcaaattttcagatgaagcactggaacgta

SEQ ID NO: 34593 - DNA, 260 bp, Unknown
  Description of Unknown: RightRegion for integrase B8594 sequence
ataattgataaggtgattgtaggcaaggacgatatagaaattcagctaaaaaacttttagcacttacataatgcagttcctatggcgttaaggtggtgctataccacatatacactacattctttttgacacatgacgcacaatgcgtctttttttattgccatttttaaagctgtgtgatatgttaagtatgtacttaggaggtatattgatgattgatatatctaagctgataaaggctgaatatgagtacataagat

SEQ ID NO: 34594 - DNA, 260 bp, Unknown; identical to SEQ ID NO: 34543
  Description of Unknown: RightRegion for integrase B8595 sequence

SEQ ID NO: 34595 - DNA, 260 bp, Unknown
  Description of Unknown: RightRegion for integrase B8596 sequence
ttatcgatcatcgatcatgtggtggttaaccgagaaacttttgaaatcacttttttgtaaaaagaaaaggtgctcactcagagcaccttttttaattcatccaacattttgttatatacctcgagtctgaaaccaattagctcgtctttatgtttacttgcgatcatgtcctccggtaaatacttctcttcgtcctcagctgattcataaattgtaagatactcaggggcctcagaactgacgaccccatatgttatctc

SEQ ID NO: 34596 - DNA, 260 bp, Unknown
  Description of Unknown: RightRegion for integrase B8597 sequence
ataattgataaggtgattgtaggcaaggacgatatagaaattcagctaaaaaacttttagcacttacataatgcagttcctatggcgttaaggtggtgctataccgcatatacactacattctttttggcacatgacgcataatgcgtctttttttattgccatttttaaagctatgtgatatgttgagagtgtacttaggaggtatattgatgattgatatatctaagctgataaaggctgaatatgagtacataagat

SEQ ID NO: 34597 - DNA, 260 bp, Unknown
  Description of Unknown: RightRegion for integrase B8598 sequence
ataattgataaggtaattgtaggcaaggacgatatagaaattcagttaaagaacttttagcacctacataatgcagttcctatggcattaaggtggtgctataccgcatatacactacattctttttgacacatgacgcataatgcgtcttttttattgctattttttaggctgtatgttatgttgattgtgtacttaggaggtatattgatgattgatatatctaagctgataaaggctgaatatgagtacataagatt

SEQ ID NO: 34598 - DNA, 260 bp, Unknown; identical to SEQ ID NO: 34538
  Description of Unknown: RightRegion for integrase B8599 sequence

SEQ ID NO: 34599 - DNA, 260 bp, Unknown
  Description of Unknown: RightRegion for integrase B8600 sequence
ataattgataaggtgattgtaggcaaggacgatatagaaattcagctaaaaaacttttagcatgtacttaatgcagttcctatggcgttaaggtggtgctataccgcatatacactacattctttttaacacatgacgcattatgcgtcttttttattgctattttttaggctatatgttatgttgattgtgtacttaggaggtatattgatgattgatatatctaagctgataaaggctgaatatgagtacataagatt

SEQ ID NO: 34600 - DNA, 260 bp, Unknown
  Description of Unknown: RightRegion for integrase B8601 sequence
ataatctctaaagtagtagttgtcaacggaaacgttgacattcagttaaaatctttttagcataagcctataaccgtccgatggttggcggatatgctaagtgccatatttcctatatgtcccaaatattaatgttataagtgtgtcggaattatgtcttttgaatgtcgctataagcgactttttttgtgcgaaaatacaaaatagataggaggtacgacctatgttttcagatgatctattaactattatattctcag

SEQ ID NO: 34601 - DNA, 260 bp, Unknown
  Description of Unknown: RightRegion for integrase B8602 sequence
ataatcgacaaagttgtgattgtcaacggagatgttgagatccagctacaacggttttgatattaaataaggaaacaactagcacaaactatatgcggtacctatgatatatagtttgtgctagataccacatataacgctatatatggaggtgctggcatgcggacgagggaaaaaaagctgtcggactacggcgtaccaaacgccctgtacagagagataaaagagcggtgttacaacagtacagacgaggatcgaga

SEQ ID NO: 34602 - DNA, 130 bp, Unknown
  Description of Unknown: RightRegion for integrase B8603 sequence
ataatagataaaatcgtaatagtcaatggaaatatcgaaattcagttaaaaaaattttagcataaacataatgccatgcctacggcattaagttagtgctaacgccgtatttatcactatttcaaaatac

SEQ ID NO: 34603 - DNA, 260 bp, Unknown
  Description of Unknown: RightRegion for integrase B8604 sequence
ataattgacaaaattgtaatagtcaatggaaatatcgaaattcagttaaagaatttttagcacttactgtatgccgtgcctatgatagccggcgaaataaagcgttttttgagggatgacggaatgcttaaggtgagccgttcgattaaggagaacggctacaggataaagagggcttcggacgagcttgtgtctaagaacggaagggaggcaactgttgaggagcttgcggcggcgacggagctgtcagtcgaggatgt

SEQ ID NO: 34604 - DNA, 260 bp, Unknown
  Description of Unknown: RightRegion for integrase B8605 sequence
ataattgataaagtgattgtaggcaaggacgatatagaaattcagctaaaaaacttttagcacctacataatgcagttcctatggcgttaaggtggcgctataccgcatatacactacattctttttgacacatgacgcattatgcgtcttttttattgctattttttaggctatatgttatgttgattgtgtacttaggaggtatattgatgattgatatatctaagctgataaaggctgaatatgagtacataagatt

SEQ ID NO: 34605 - DNA, 260 bp, Unknown
  Description of Unknown: RightRegion for integrase B8606 sequence
ataattgataaagtgattgtaggcaaggacgatatagaaattcagttaaaaaacttttagcacctacataatacagttcctatgataataggggaatgtaggagatatctgagagacaacaatgcgataagggtgtcacgttccctccgcgatatagcgtacaaagcgatatatgcgaaggagaatctgcaaaagactagggataaggaacctacgatagaagagatagcggaggagataagtatacctaaggaagatat

SEQ ID NO: 34606 - DNA, 260 bp, Unknown
  Description of Unknown: RightRegion for integrase B8607 sequence
ataattgaaaaaatcgtaattagcaatggaaatattgagataaaattgaaagatttttagcactacaataatgctatcctatggtatatatttactgctaatataggtatattaatttagcagtaaaatagtaccatacctgcggtattgggttagtgctaatgcgcatatttactacacttttgagtcattatagtggcaattattagtcgctattaatggctctttttgttttatgataattacaaagggaggaataa

SEQ ID NO: 34607 - DNA, 260 bp, Unknown
  Description of Unknown: RightRegion for integrase B8608 sequence
attatagaccgtatcataattgatgatgataatgtcaatatcaaactaaaacagctataatttagtttacaagctttctaataccatgtgtatgggattcggatgcaacgcagcgggcatcgtgggctgccgcatcattgattctcccagggagcggctcattgccatgataaccaacaactttgtgccctgcaacggaaggtttcccaccctaatcgccattatctccatgttttttgtgggcgtatccggaggtgcct

SEQ ID NO: 34608 - DNA, 260 bp, Unknown
  Description of Unknown: RightRegion for integrase B8609 sequence
ataattgataagattgttatagtcaatggagatattgaaatacagttaaagaatttttagcacttactatacgctgtgccaatggcattaagttagtgctaatgccgtgcttatcgtactttttacaattaaataaaatcaaactgtcgtttttgtgtcgttaaactgtcgtttttctgtcgctttaagcggctttttttatgtgaaaataaaattacaaaaaggagagtgattgaaatgtacgacgaagatttaagaga

SEQ ID NO: 34609 - DNA, 260 bp, Unknown
  Description of Unknown: RightRegion for integrase B8610 sequence
ataatatcaaggattgtgattgtcaatggtgatgttgaaattcaattaaagaatttttagcagaacctattgttatcggaatggcaataggatgtgctaatgccgtatttatcataattttaaaactgcatatttttttgtttgtcgcaaaagtgtcgtatatgtgtcgctatatgcgactttttttatgccaaaatttaagcataaggaggaatgaccttatggcaaaattcagattttcagatgaagcactggaacgt

SEQ ID NO: 34610 - DNA, 79 bp, Unknown
  Description of Unknown: RightRegion for integrase B8611 sequence
ataatagacaaaattgttatagtcaatggaaatatcgaaattcaattaaaaaatttttagcacaaacttaatgccgtgc

SEQ ID NO: 34611 - DNA, 260 bp, Unknown
  Description of Unknown: RightRegion for integrase B8612 sequence
ataatatcaaggattgtgattgtcaatggtgatgttgaaattcaattaaagaatttttagcagaacctattgttatcggaaccgcataggtagagaacttcacacccagagtagcgtcgaaattgtcaatggctttgatcagcccgatgcagccaatctggaacaggtcatccacgttctccgaactgcttgaaaaacgtttgatcacacttaggaccagacgtaaattcccttcgatataggtctctcgggcagcggta

SEQ ID NO: 34612 - DNA, 260 bp, Unknown
  Description of Unknown: RightRegion for integrase B8613 sequence
ataatagataggattgttatagtcaatggaaatattgaaatacaattaaagaatttttagcagaaacttaatgccatgggcatggcatataggaagtgctaatgccgtatttatcacattttaataattgcataattttaatattgtcgcttatatgtcgtacacatgtctattatgtgtcgctataagcgtctttttttatgtcaaaattaagttagaaagagaggtagtgtgaatgttttctgatgaagttagagaaa

SEQ ID NO: 34613 - DNA, 127 bp, Unknown
  Description of Unknown: RightRegion for integrase B8614 sequence
ataatagacaaaattgttatagtcaatggaaatatcgaaatccaattaaaaaatttttagcacaaacttaatgctgtgcccatgataattggggagataagacgttttttgagggataacagccaga

SEQ ID NO: 34614 - DNA, 260 bp, Unknown; identical to SEQ ID NO: 34543
  Description of Unknown: RightRegion for integrase B8615 sequence

SEQ ID NO: 34615 - DNA, 260 bp, Unknown
  Description of Unknown: RightRegion for integrase B8616 sequence
ataaaagaaatcttaattgaccctgagactcacgagctgaatggcataatatttttttagtttgttggtgtatcaaacatactaactcaaccgtgtaatcagcctctcccgagacaaatgctcctgacgtattggcaaaatcaatgttttgtacaaggttaatgtctttttgtggattcattccatgtttctttaaaacgtattcaaataccatttctggcataccacctggtcttccaccaatgacttttttccccttt

SEQ ID NO: 34616 - DNA, 260 bp, Unknown
  Description of Unknown: RightRegion for integrase B8617 sequence
ataattgacaagatagtaattgtcaatggaaatattgaaatacagcttaagaatttttagcataaacttaatgcagttcctatgattacgggtgagattaaaagatttcttagagatgacggcataataaagataagccggagtattaaggaaaatggatacaaatgttttatggcttcccagaagttaaagggtattcttaaccgcgagccgactattgaggagctgtccagggaaacaggaatagcgacagaggatat

SEQ ID NO: 34617 - DNA, 260 bp, Unknown
  Description of Unknown: RightRegion for integrase B8618 sequence
ataatagacaaaattgttatagtcaatggaaatatcgaaattcaattaaaaaatttttagcacaaacttaatgccgtgcctatggcatataggaagtgctaatgccgtatttatcacgttttaacaactgcataattttaaaaatgtcgcttatgtgtcatatatgtgtctattatatgtcgctataagcgtctttttttatgccaaaattaagttagaaagagaggtagtgcgaatgttttctgatgaagttagagaaa

SEQ ID NO: 34618 - DNA, 260 bp, Unknown
  Description of Unknown: RightRegion for integrase B8619 sequence
ataatcgaaaaaataatagttagcaatggaaatattgaaataagattgaaagatttttagcacatacataatgctatccaatggaatattgttactgctaatataggaaacttttattatcagtaacgtaacgccatacctacggcattgtgttagtgctaatgcgcatatttactacacttttgagtcattatagtggcaattattagtcgctattaatggctctttttgttttatgataattacaaagggaggaataa

SEQ ID NO: 34619 - DNA, 260 bp, Unknown
  Description of Unknown: RightRegion for integrase B8620 sequence
ataatagataggattgttatagtcaatggaaatattgaaatacagttaaagaatttttagcagaaacttaatgccatgggcatggcatataggaagtgctaatgccgtatttatcacgttttacaattatataatttcaatgctgtcgcttatatgtcgtacacatgtctattatgtgtcgctttaagcgtctttttttatgcaaaaatgtaatcagaaagagaggtaatgcgaatgttttctgatgaagttagagaaaa

SEQ ID NO: 34620 - DNA, 260 bp, Unknown
  Description of Unknown: RightRegion for integrase B8621 sequence
ataattgaaaaaatcgtaattagcaatggaaatattgaaataagattgaaagatttttagcacatacataatgctatccaatggaatattgttactgctaatataggaaacttttattatcagtaacgtaacgccatacctatggtatttggttagtgctaatgcgcatatttactacacttttgagtcattatagtggcaattattagtcgctattaatggctctttttgttttatgataattacaaagggaggaataa

SEQ ID NO: 34621 - DNA, 260 bp, Unknown
  Description of Unknown: RightRegion for integrase B8622 sequence
ccggagcagccgcaggcgcggcaatcggtagcattattcctggtcttggtactgcggtaggtgccttggtaggcgcaggagttggaggcattgcaggttggataaagggaaacaaggtcaagaaagagtatcaggacaatgtggaggagatgcagaaagaagctgaaaaagctcaaaaggtattcgatgccactggattatcaatcgacaaagtaagatttgcgaatgatgatttgaacgatgcaatgaatgacagttcc

SEQ ID NO: 34622 - DNA, 260 bp, Unknown
  Description of Unknown: RightRegion for integrase B8623 sequence
ataattgacaagataatcattgtcaacggaaatattgagatacaattaaagaatttttagcacttactgtatgccatccctacggcggtatgctagtgctaatgccgtatttatcgcgttttttcaaagtggaaattgaatatttgtcgcttttatgtcgccaagctgtcgctttaggcggctttttttatgccaaaatataagcaaaaggaggggtaaccgatgttgtcagacaaagtaattgagaagattttcgcgaa

SEQ ID NO: 34623 - DNA, 127 bp, Unknown
  Description of Unknown: RightRegion for integrase B8624 sequence
ataatagacaaaattgttatagtcaatggaaatatcgaaattcaattaaaaaatttttagcacaaacttaatgctgtgcccatgataattggggagataagacgttttttgagggataacagccaga

SEQ ID NO: 34624 - DNA, 109 bp, Unknown; identical to SEQ ID NO: 34552
  Description of Unknown: RightRegion for integrase B8625 sequence

SEQ ID NO: 34625 - DNA, 260 bp, Unknown
  Description of Unknown: RightRegion for integrase B8626 sequence
ataattgataaagtgattgtaggcaaggacgatatagaaattcagctaaaaaacttttagcacttacataatgcagttcctatgatcataggtgagtgtagaaggtatctcagagataacaatgctataagagtatcaaggtcattgcgtgatatagcctacaaggcgatatatgccaaggaaaatctccagaagacaaaggataaggagccgacgatagaggagatagcggaggagataagtataccgaaggaagatat

SEQ ID NO: 34626 - DNA, 260 bp, Unknown
  Description of Unknown: RightRegion for integrase B8627 sequence
ataatatcaaggattgtgattgtcaatggtgatgttgaaattcaattaaagaatttttagcagaacctattgttatcggagtggcaataggatgtgctaatgccgtatttatcatacttttaaaactgcatattttttgtttgtcgcaaaagtgtcgtatatgtgtcactatatgcgactttttttatgccaaaatttaatcataaggaggaatgaccttatgggaaaattcaaattttcagatgaagcactggaacgta

SEQ ID NO: 34627 - DNA, 260 bp, Unknown
  Description of Unknown: RightRegion for integrase B8628 sequence
ataattgacaagatagtaattgtcaatggaaatattgaaatacagcttaagaatttttagcataaacttaatgcagttcctatagcatataggaagtgctaatgccgcatttatcacgttttacaattatataatttcagcattgtcgcttatatgtcgcacatatgtctattatgtgtcgctataagtgattttttttatgcaaaaatgtaactagaaagagaggtaatgtgaatgttttctgatgaagttagagaaaa

SEQ ID NO: 34628 - DNA, 109 bp, Unknown
  Description of Unknown: RightRegion for integrase B8629 sequence
ttaataaagaaaataaaaattaatgatataaaaaaatttgattttttaatagagttgtgatattctaaaaatagagaaattaaataaaatattatcttcagggcagggt

SEQ ID NO: 34629 - DNA, 260 bp, Unknown
  Description of Unknown: RightRegion for integrase B8630 sequence
ataattgacaagatagtaattgtcaatggaaatattgaaatacagcttaagaatttttagcacaaacttaatgcagttcctataacatataggaagtgctaatgccgcatttatcacgttttacaattatataatttcagcattgtcgcttatatgtcgcacatatgtctattatgtgtcgctataagtgattttttttatgcaaaaatgtaactagaaagagaggtaatgcgaatgttttctgatgaagttagagaaaa

SEQ ID NO: 34630 - DNA, 260 bp, Unknown
  Description of Unknown: RightRegion for integrase B8631 sequence
ataatagataggattgttatagtcaatggaaatattgaaatacagttaaagaatttttagcagaaacttaatgccatgggcatggcatataggaagtgctaatgccgtatttatcacgttttacaattatataattttaatgttgtcgcttatatgtcacacatatgtctatcatgtgtcgctttgagcgtctttttttatgccaaaatataatcagaaagagaggtagtgcgaatgttttctgatgaagttagagaaaa

SEQ ID NO: 34631 - DNA, 80 bp, Unknown; identical to SEQ ID NO: 34496
  Description of Unknown: RightRegion for integrase B8632 sequence

SEQ ID NO: 34632 - DNA, 260 bp, Unknown
  Description of Unknown: RightRegion for integrase B8633 sequence
ataatatcaaggattgtgattgtcaatggtgatgttgaaattcaattaaaaaatttttagcagaacctattgttatcggaaccgcgtaggtggaaaattttacaccaagcgtggaatcaaaattgtcgatggccttgatcagaccgatacagccgatctggaacagatcgtccacattttccgcactgccggaaaagcgtttgatcacgctcaggaccagacgcaggttgccttcgatgtaggtctctctggcggcggta

SEQ ID NO: 34633 - DNA, 260 bp, Unknown
  Description of Unknown: RightRegion for integrase B8634 sequence
ataatcgacaaagttgtgattgtaaacggagatgttgagatccagctacaacgtttttgatattaaataaggaaacaactagcacaagctatatgccatgcctatgatatataggttgtgctagatagcacatataacgctatatatggaggtgctggcatgaggacacgggaaaaaaagctgtcggattacggcgtaccaaacaccctatacagagagataaaagagcggtgttacaacagtacagacgaggatcgaga

SEQ ID NO: 34634 - DNA, 109 bp, Unknown
  Description of Unknown: RightRegion for integrase B8635 sequence
ttgataaagagaataaaaattaatgatataaaaaaatttgattttttaatagagttgtgatatcctaaaaatagagaaattaaataaaatattatcttcagggcagggt

SEQ ID NO: 34635 - DNA, 260 bp, Unknown
  Description of Unknown: RightRegion for integrase B8636 sequence
aagagttggaggatgaaaaatgacaaaaaaagtaacaacgataccagcattactaaataagcaatctacaaatcaggttggaatagtaaaaaagagaagagttgctgcatatgccagagtttcaacagaccaagaagaacaattaacaagttatgaggcacaggtcgattattataccaattatataaaatcaagagatgattgggaatttgtagatgtttatactgatgaaggaataagtggaacttcaaccaaacatc

SEQ ID NO: 34636 - DNA, 260 bp, Unknown
  Description of Unknown: RightRegion for integrase B8637 sequence
ataattgacaaggtaatcattgtcaatggcaatattgagatacagttaaagaatttttagcacttactgtatgcggttccgatgatagccggcgagataaaaagatttttaagggatgacggaatgctcaaggtaagccgttcgctcaaggagaatggatacaggataaagaaggcgtccgataagcttgtatcacagaacggaagggaggcaacgatagaggagcttgcggcagccacggagctgtcggttgaggatgt

SEQ ID NO: 34637 - DNA, 260 bp, Unknown
  Description of Unknown: RightRegion for integrase B8638 sequence
ataattgacaaggtaatcattgtcaatggcaatattgagatacagttaaagaatttttagcacttactgtatgcggttcctatgattataggcgaaataagaaggtacctgcgcgacacatcaagccagataagggtaagccgttcgcttaaggatacggcatacaaggcaatatatgcaagggaacgtctgtctaagacaaatctcagggaaccgacactcaacgagatagcaggtgagataggtgcgagccgtgaaga

SEQ ID NO: 34638 - DNA, 260 bp, Unknown
  Description of Unknown: RightRegion for integrase B8639 sequence
gaggagatatacatagataaggatacccacaagatctgcgggtttaaatttttactctgatggtgtagtaaactatataattcagttgaattcgagccaggcgccaccaaccttgaaaaagaaggcaaaggctatgttgttgcctctctcggaacagacagcggttatgtgccatacactgcattctccgcaaagcagagttatattgacaagaaccccaaagtcatccagggatttaccaatgcgctgcagaaaggcat

SEQ ID NO: 34639 - DNA, 260 bp, Unknown
  Description of Unknown: RightRegion for integrase B8640 sequence
ataattgacaagatagtgattgtcaatggaaatattgaaattcagttaaagaatttttagcacaaacttaatgcagttcctacagcgttaagttaatgctaatgccgtatttatcacgttttacaattatataattttaatgctgtcgcttatatgtcacacatatgtctattatgtgtcgctttgagcgtctttttttatgccaaaatgtaatcagaaagagaggtaatgcgaatgttttctgatgaaattagagaaaa

SEQ ID NO: 34640 - DNA, 260 bp, Unknown; identical to SEQ ID NO: 34533
  Description of Unknown: RightRegion for integrase B8641 sequence

SEQ ID NO: 34641 - DNA, 260 bp, Unknown
  Description of Unknown: RightRegion for integrase B8642 sequence
ataattgacaagataatcattgtcaacggaaatattgagatacaattaaagaatttttagcacttactgtatgccatccctatggcggtatgctagtgctaatgctgtatttatcgcgttttttcaaagggaaaattgaatatttgtcgcttttatgtcgccaagctgtcgctttaggcggctttttttatgccaaaatataagcaaaaggagggataaccgatgttgtcagacaaagtaattgagaagattttcgcaaa

SEQ ID NO: 34642 - DNA, 260 bp, Unknown; identical to SEQ ID NO: 34533
  Description of Unknown: RightRegion for integrase B8643 sequence

SEQ ID NO: 34643 - DNA, 260 bp, Unknown
  Description of Unknown: RightRegion for integrase B8644 sequence
ataatcgacaaagttgtgattgtcaacggagatgttgagatccagctacaacggttttgatattaaataaggaaacaactagcacaaactatatgccatgcctatgatatatagtttgtgctagataccacatataacgctatacatggaggtgctggcatgaggacgagggaaaaaaaactgtcggattacggtgtaccgaacaccctatacagagagataaaagagcggtgttgcaacagtacagacgaggatcgaga

SEQ ID NO: 34644 - DNA, 82 bp, Unknown
  Description of Unknown: RightRegion for integrase B8645 sequence
ataattgacaaggtaatcattgtcaatggcaatattgagatacagttaaagaatttttagcacttactgtatgcggttccta

SEQ ID NO: 34645 - DNA, 260 bp, Unknown
  Description of Unknown: RightRegion for integrase B8646 sequence
atagtagagaaaatcgtaatagtcaatggagatgtagaaattgtattaaagaacttttagcacatacatactgcacgtccgatggctgtagtttatgctaaacgccgtatttcctgtgtttacgaatagtggttgtcgcttatgtggcatgattttgacgctgagagcgtctttttttatgcgaaaattcaaataaaggggtggtgatatgttttcagatgtgcttttagaaaaaatattttgtgacgaaagaatgagac

SEQ ID NO: 34646 - DNA, 260 bp, Unknown
  Description of Unknown: RightRegion for integrase B8647 sequence
ataatagacaaaattgttatagtcaatggaaatatcgaaattcaattaaaaaatttttagcacaaactcaatgccgtgcccatgataattggggagataagacgttttttgagggataacagccagatacgggtgtcgaggtcgcttaaagatgtggcattcagggcaatatatgccaaagaaagaattatgaaaacagggaaggatgaacccacggttaatgaacttgccacggaaataggtgtaagcaaagaagaact

SEQ ID NO: 34647 - DNA, 260 bp, Unknown; identical to SEQ ID NO: 34619
  Description of Unknown: RightRegion for integrase B8648 sequence

SEQ ID NO: 34648 - DNA, 260 bp, Unknown
  Description of Unknown: RightRegion for integrase B8649 sequence
ataatagacaaaattgttatagtcaatggaaatatcgaaattcaattaaaaaatttttagcacaaacttaatgctgtgcccatgataattggggagataagacgttttttgagggataacagccagatacgggtgtcgaggtcgcttaaagatgtggcattcagggcaatatatgccaaagaaagaattatgaaaacagggaaggatgaacccacggttaatgaacttgccacggaaataggtgtaagtaaagaagaact

SEQ ID NO: 34649 - DNA, 260 bp, Unknown
  Description of Unknown: RightRegion for integrase B8650 sequence
ataattgacaagatagtaattgtcaatggaaatattgaaatacagcttaagaatttttagcataaacttaatgcagttcctacagcatataggaagtgctaatgccgcatttatcacgttttacaattatataatttcagcattgtcgcttatatgtcgcacatatgtctattatgtgtcgctataagtgattttttttatgcaaaaatgtaactagaaagagaggtagtgcgaatgttttctgatgaagttagagaaaa

SEQ ID NO: 34650 - DNA, 260 bp, Unknown
  Description of Unknown: RightRegion for integrase B8651 sequence
ataatagataagattgttatagtcaatggaaatattgaaatacagttaaagaatttttagcagaaacttaatgccatgggcatggcatataggaagtgctaatgccgtatttatcacgttttacaattatataatttcaatgctgtcgcttatatgtcgtacacatgtctattatgtgtcgctataagtgtctttttttatgtcaaaattaagtcagaaagagaggtaatgtgaatgttttctgatgaagttagagaaaa

SEQ ID NO: 34651 - DNA, 260 bp, Unknown
  Description of Unknown: RightRegion for integrase B8652 sequence
ataatcgacaaagttgtgattgtcaacggagatgttgagatccagctacaacggttttgatattaaataaggaaacaactagcacaaactatatgccatacctatgatatataggttgtgctagataccacatataacgctatatatggaggtgctggcatgaggacgagggaaaaaaagctgtcggattacggcgtaccaaacgccctgtacagagagataaaagagcggtgttataacagtacagacgaggatcgaga

SEQ ID NO: 34652 - DNA, 260 bp, Unknown
  Description of Unknown: RightRegion for integrase B8653 sequence
ataattgacaaaattgtaatagtcaatggaaatattgaaattcagttaaagaatttttagcatttactatatgctgtacctatggcagtatgctagtgctaatgccgtatttatcgcgtttttcaaaaagcaaaataaaatatttgtcgcttttatgtcgccaagctgtcgctttgagcgactttttttatgccaaaatataagcaaaggagggataacagatgttgtcggataaagtgaaagaaaaacttttcgcaaag

SEQ ID NO: 34653 - DNA, 260 bp, Unknown
  Description of Unknown: RightRegion for integrase B8654 sequence
ataatctctaaagtagtagttgtcaacggaaacgttgacattcaattaaaatctttttagcataaccttattaccgtccgatggttggcggatatgctaagtgccatatttcctatatgtcccaaatattaatgttataagtgtgtcggaattatgtcttttgaatgtcgctataagcgactttttttgtgcgaaaatacaaaatagataggaggtacgacctatgttttcggatgacttattaactattatattctcag

SEQ ID NO: 34654 - DNA, 260 bp, Unknown
  Description of Unknown: RightRegion for integrase B8655 sequence
ataattgacaagatagtaattgtcaatggaaatattgaaatacagcttaagaatttttagcataaacttaatgcagttcctataacatataggaagtgctaatgccgcatttatcacgttttacaattatataatttcagcattgtcgcttatatgtcgtacatatgtctattatgtgtcgctataagtgattttttttatgcaaaaatgtaactagaaagagaggtaatgcgaatgttttctgatgaagttagagaaaa

SEQ ID NO: 34655 - DNA, 260 bp, Unknown
  Description of Unknown: RightRegion for integrase B8656 sequence
ataattgacaagatagtaattgtcaatggaaatattgaaatacagcttaagaatttttagcacaaacttaatgcagttccgatgattacgggtgagattaaaagatttcttagagatgacggcataataaagataagccggagtattaaggaaaatggatacaaatgttttacggcttcccagaagttaaagggtattcttaaccgcgagccgactattgaggagctgtccagggaaacaggaatagcgacagaggatat

SEQ ID NO: 34656 - DNA, 260 bp, Unknown
  Description of Unknown: RightRegion for integrase B8657 sequence
ataattgacaaggtaatcattgtcaacggaaatattgagatacaattaaagaatttttagcacttactgtatgccatgccgatggcagtatgctagtgctaatgccgtatttatcgcgttttttcaaagtggaaattgaatatttgtcgcttttatgtcgccaagctgtcgctttagacggctttttttatgccaaaatataagcaaaaggagggataaccgatgttgtcagataaggtgattgagaagattttcgcaaa

SEQ ID NO: 34657 - DNA, 260 bp, Unknown; identical to SEQ ID NO: 34533
  Description of Unknown: RightRegion for integrase B8658 sequence

SEQ ID NO: 34658 - DNA, 260 bp, Unknown
  Description of Unknown: RightRegion for integrase B8659 sequence
attatagaccgcatcataattgatgatgataatgtcaatatcaaactaaaacatctatgatttaatctacaagttttcaaatactatgtgtatgggattcggatgcaacgcagcgggcatcgtgggctgccgcatcattgattctcccagggagcggctcattgccatgataaccaacaactttgtgccctgcaacggaaggtttcccaccctcatcgccattatctccatgttttttgtgggcgtatccggaggtgcct

SEQ ID NO: 34659 - DNA, 260 bp, Unknown; identical to SEQ ID NO: 34533
  Description of Unknown: RightRegion for integrase B8660 sequence

SEQ ID NO: 34660 - DNA, 260 bp, Unknown
  Description of Unknown: RightRegion for integrase B8661 sequence
ataattgaaaaaatagtaattagcaatggaaatattgagataaaattgaaagatttttagcactacaataatgctattctatggtatatatttactgctaatataggtatattgatttagcagtaaaatagtaccatacctatggtattgggttagtgctaatgcgcatatttactacacttttgagtcattatagtggcaattattagtcgctattaatggctctttttgttttatgataattacaaagggaggaataa

SEQ ID NO: 34661 - DNA, 260 bp, Unknown
  Description of Unknown: RightRegion for integrase B8662 sequence
ataatcgaaaagattgtaattgtcaatggaaatgttgaaattcaattgaaaaatttttagcactgactaataatcataggtatgattattagcttgtcgaaacgccgtgtttatcatactttcaagagctgcaaaaatcatatagtcgcttaaatgtcgttttcaagacgtttgaagcgactttttttttgccaaaatttaggtacaaggagggcatgatatgttttcggatgaaatacttgaaaagatttttggaagag

SEQ ID NO: 34662 - DNA, 260 bp, Unknown
  Description of Unknown: RightRegion for integrase B8663 sequence
ataatatcaaggattgtgattgtcaatggtgatgttgaaattcaattaaagaatttttagcagaacctattgttatcggagtggcaataggatgtgctaatgccgtatttatcatacttttaaaacttcatattttttcgtttgtcgcaaaagtgtcgtatatgtgtcactatatgcgactttttttatgccaaaatttaagcataaggagggatgaccttatgggaaaattcaaattttctgatgaaacactggaacat

SEQ ID NO: 34663 - DNA, 260 bp, Unknown
  Description of Unknown: RightRegion for integrase B8664 sequence
ataattgataaggtaattgtaggcaaggacgatatagaaattcagttaaagaacttttagcacctacataatgcagttcctatgatcataggtgagtgcagaaggtatctcagagataacaatgctataagagtatcaaggtcattgcgtgatatagcctacaaggcgatatatgccaaggaaaatctccagaagacaaaggataaggagccgacgatagaggagatagcggaggagataagtataccgaaggaagatat

SEQ ID NO: 34664 - DNA, 260 bp, Unknown
  Description of Unknown: RightRegion for integrase B8665 sequence
ataattgacaagataatcattgtcaatggcaatattgagatacagttaaagaatttttagcacttactgtatgctgtgcctacggcggtatgctagtgctaatgccgtatttatcgcgttttttcaaagtggaaattgaatatttgtcgcttttatgtcgccaagctgtcgctttaggcggctttttttatgccaaaatataagcaaaaggaggggtaaccgatgttgtcagacaaagtaattgagaagattttcgcgaa

SEQ ID NO: 34665 - DNA, 260 bp, Unknown
  Description of Unknown: RightRegion for integrase B8666 sequence
attgtagaccgcatcataattgatgatgataatgtcaatatcaagctaaagcagttataatctaatttacaagttttcttatactatgtgtatgggattcggatgcaacgcagcgggcattgtgggatgccgtatcattgattcccccagagaacggcttattgccatgataaccaacaactttgtgccatgcaacggaaggtttcccacactcatcgccatcatctccatgttctttgtgggtgtatccggaggcgcct

SEQ ID NO: 34666 - DNA, 260 bp, Unknown; identical to SEQ ID NO: 34540
  Description of Unknown: RightRegion for integrase B8667 sequence

SEQ ID NO: 34667 - DNA, 260 bp, Unknown
  Description of Unknown: RightRegion for integrase B8668 sequence
ataatagataaagttattatagtcaatggaaatgttgaaattcagttaaagaatttttagcatatacttaatgctacgggaacggcgtaggttgagaattgtacgccctgtgaaatatcaaaattatcaattgctttaatcatgccgacacagccaatctggaataaatcgtcaatattttcactgctttgtgaaaaacgctggacaatgcttaaaacaaggcgcagatttccgttaataaaacgctcgcgtgcctgtgt

SEQ ID NO: 34668 - DNA, 260 bp, Unknown; identical to SEQ ID NO: 34533
  Description of Unknown: RightRegion for integrase B8669 sequence

SEQ ID NO: 34669 - DNA, 260 bp, Unknown
  Description of Unknown: RightRegion for integrase B8670 sequence
ataattgataaagtgattgtaggcaaggatgatatagaaattcagttaaagaacttttagcacctacataatgcagttcctatgataataggggaatgtaggagatatctgagagacaacaatgcgataagggtgtcacgttccctccgcgatatagcgtacaaagcgatatacgcgaaggagaatctgcaaaagactagggataaggaacctacgatagaagagatagcggaggagataagtatacctaaggaagatat

SEQ ID NO: 34670 - DNA, 260 bp, Unknown
  Description of Unknown: RightRegion for integrase B8671 sequence
ataatagaaaaagtagttattgtcaatggtgatattgaaatacagttaaaaacgttttagcgtcaaaaatagccgtaggtacggcatataggaagtgctaatgccgtatttatcatacataattttatcaaaaaaatccatgtcacacaatagtctttagaatgtcgcttttagcgactttttttgtgcaataattcatatataggagaaaaaccatgattatgaattttagtccttttgagtttgaaataatgaacgag

SEQ ID NO: 34671 - DNA, 260 bp, Unknown; identical to SEQ ID NO: 34535
  Description of Unknown: RightRegion for integrase B8672 sequence

SEQ ID NO: 34672 - DNA, 260 bp, Unknown
  Description of Unknown: RightRegion for integrase B8673 sequence
ataattgacaaggtaatcattgtcaacggaaacatcgagatacaattaaagaatttttagcacttactgtatgccatgcctacggcggtatgctagtgctaatgccgtatttatcgcgttttttcaaaggggaaattgaatatttgtcgcttttatgtcgccaagctgtcgctttaggcggctttttttatgccaaaatataagcaaaaggagggataaccgatgttgtcagataaggtgattgagaagattttcgcgaa

SEQ ID NO: 34673 - DNA, 260 bp, Unknown
  Description of Unknown: RightRegion for integrase B8674 sequence
ataattgacaagataatcattgtcaacggaaatattgaaatacagttaaaaagtttttagcacttactgtatgctgtgcctatggcagcatgctagtgctaatgccgtatttatcgcgtttttcaaaaagggaaataaaatatttgtcgcttttatgtcgccaagttgtcactttaggtggctttttttatgccaaaatataaacaaaaggagggataacagatgttgtcggacaaagtgaaagaaaagctttttgcaaa

SEQ ID NO: 34674 - DNA, 83 bp, Unknown
  Description of Unknown: RightRegion for integrase B8675 sequence
ataattgataaggtaattgtaggcaaggacgatatagaaattcagctaaaaaacttttagcacttacataatgcagttcctat

SEQ ID NO: 34675 - DNA, 260 bp, Unknown
  Description of Unknown: RightRegion for integrase B8676 sequence
cgtactatcaggcgtattgagatcgatggaaagaaggtgtctaaggtgttttttatataatttttttattctttttgttgctattatgtcaccttgccacttgtaatagtaacataatagcaactagttaaataatatcaataaaagcaccgatttagtgcaaatatatactttacaaagtaccgaatcggtgctatgctatagccataacaaagaaaggaactaccaaaggtagcaagataaaggaaaatgaagagaga

SEQ ID NO: 34676 - DNA, 260 bp, Unknown
  Description of Unknown: RightRegion for integrase B8677 sequence
ataaaagaaatcttaattgaccctgagactcacgagctgaatggcataatatttttttagtttgttggtgtatcaaacatgctaactcaacagagttttctttttaatgcactaacttttcgtattccttccttatattataatccctaaatattaactacatttagggattatttcttgtatagcttatttactcttaataagcttgcctttctttagaagattcagcaaccttgtattctgcattgcactgccggtat

SEQ ID NO: 34677 - DNA, 260 bp, Unknown
  Description of Unknown: RightRegion for integrase B8678 sequence
ataatagataagattgttatagtcaatggaaatattgaaatacagttaaagaatttttagcagaaacttaatgccatgggcatggcatataggaagtgctaatgccgcatttatcacgtttttataattgcataattttaataatgtcgcttatgtgtcatatatatgtctattatatgtcgctatgagcgtctttttttatgccaaaatataatcagaaagagaggtagtgtaaatgttttctgatgaagttagagaaa

SEQ ID NO: 34678 - DNA, 260 bp, Unknown
  Description of Unknown: RightRegion for integrase B8679 sequence
atagtagagaaaatcgtaatagtcaatggagatgtagaaattgtattaaagaacttttagcacagacatactgcacgtccgatggcggtagtttatgctaaacgccgtatttcctgtgtttgcgaatagtggttgtcgcttatgtggcatgattttgacgctgagagcgtctttttttgtgcgaaaattcaaataaaggggtggtgatatgttttcagatgcgcttttagaaaaaatattttgtgacgaaagaatgagac

SEQ ID NO: 34679 - DNA, 260 bp, Unknown
  Description of Unknown: RightRegion for integrase B8680 sequence
gaacgttttgctgtactgtccgcaggatatgaggacgagcagaagaaattgaaagcgtaagcatcagagcttactgcttttattgaaacagcagagcagaaatgtgctgatgtgaactcctttataaaggtagtgcagaagtatgagcatatcacggaacttacttccgagatcatgcatgaacttatcgagaagatagttgtttacgctcctgaaaagagcgatgggcatcgtactcagcagatcgacatttattatcg

SEQ ID NO: 34680 - DNA, 260 bp, Unknown
  Description of Unknown: RightRegion for integrase B8681 sequence
ggaattgataaggtaattgtaggcaaggacgatatagaaattcagttaaagaacttttagcacctacataatgcagttcctatggcattaaggtggtgctataccgcatatacactacattctttttgacacatgacgcataatgcgtcttttttattgctattttttaggctgtatgttatgttgattgtgtacttaggaggtatattgatgattgatatatctaagctgataaaggctgaatatgagtacataagatt

SEQ ID NO: 34681 - DNA, 260 bp, Unknown
  Description of Unknown: RightRegion for integrase B8682 sequence
ataattgacaagataatcattgtcaatggaaatgttgagatacaattaaagaatttttagcacttactgtatgccatgcctatgataataggcgaaatcagaaggtatcttcgggatacctcaagccagataagagtcagccgttcattgaaggatatggcgtacaaagcaatatatgcgagggagcgccttgcaaagactgcatcaagggagccgacaatcaatgagatagcggatgagattggcgcaagcagggagga

SEQ ID NO: 34682 - DNA, 260 bp, Unknown
  Description of Unknown: RightRegion for integrase B8683 sequence
ataattgacaagatagtaattgtcaatggaaatattgaaatacagcttaagaatttttagcataaacttaatgcagttccaatgattactggggagattaagaggtatcttcgtgataacagtgcaataagagtaagccgttcattaaaggatatggcttataaggcactttatacaaaagaacagctattaaagagcaggcagaaggaaccgacaatatcggagattgcaagtgagataggagcatctaaggaggatat

SEQ ID NO: 34683 - DNA, 260 bp, Unknown
  Description of Unknown: RightRegion for integrase B8684 sequence
ataattgacaagataatcattgtcaacggaaacattgagatacagttaaagagtttttagcacttactgtatgcggtgccgatagcagtatgctagtgctaatgccgtatttatcgcgtttttcaaaaggaaaataaaatatttgtcgcttttatgtcgccaagctgtcactttgggcggctttttttatgccaaaatataagcaaaggagggataacagatgttgtcggacaaagtgaaagaaaaacttttcgcaaaga

SEQ ID NO: 34684 - DNA, 260 bp, Unknown
  Description of Unknown: RightRegion for integrase B8685 sequence
ataatagacaaaattgttatagtcaatggaaatatcgaaattcaattaaaaaatttttagcacaaacttaatgctgtgcctatgataattggggagataagacgttttttgagggataacagccagatacgggtgtcgaggtcgcttaaagatgtggcattcagggcaatatatgccaaagaaagaattatgaaaacagggaaggatgaacccacggttaatgaacttgccacggaaataggtgtaagcaaagaagaact

SEQ ID NO: 34685 - DNA, 80 bp, Unknown; identical to SEQ ID NO: 34542
  Description of Unknown: RightRegion for integrase B8686 sequence

SEQ ID NO: 34686 - DNA, 260 bp, Unknown; identical to SEQ ID NO: 34662
  Description of Unknown: RightRegion for integrase B8687 sequence

SEQ ID NO: 34687 - DNA, 260 bp, Unknown
  Description of Unknown: RightRegion for integrase B8688 sequence
ataattgaaaaaatcgtaattagcaatggaaatattgagataaaattgaaagatttttagcactacaataatgctatcctatggtatatatttactgctaatataggtatattaatttagcagtaaaatagcgccatacccatggcatggggttagtgctaatgcgcatatttactacactttagagtcactataatggcatttatttgtcacttatagtggctttttttattttatgcttattacaaagggaggaataa

SEQ ID NO: 34688 - DNA, 260 bp, Unknown
  Description of Unknown: RightRegion for integrase B8689 sequence
ataatatcaaggattgtgattgtcaatggtgatgttgaaattcaattaaagaatttttagcagaacctattgttatcggagtggcaataggatgtgctaatgccgtatttatcatacttttaaaactgcatatttttttgcttgtcgcaaaagtgtcgtatatgtgtcactatatgcgactttttttatgcaaaaatttaagcataaggagggatgaccttatgggaaaattcaaattttcagatgaaacactggaacat

SEQ ID NO: 34689 - DNA, 260 bp, Unknown
  Description of Unknown: RightRegion for integrase B8690 sequence
atagcagaggttagattaattaatgactttagagttatggtaataaccaatatattttagggagtttattatgataatttatgacaaaataaaaagcaagtatgatagatatgatatatatgagaaatttccaacaattacagcaaggaaaattctctttgaaagagatgttgtaagaatggatattatagctaaaaatatttccttagaggatataggttatactctccaagattatatacaggactatcataaggata

SEQ ID NO: 34690 - DNA, 260 bp, Unknown
  Description of Unknown: RightRegion for integrase B8691 sequence
aaatcactaattaataagatttatatcgacgatgaacaagttactattgaatggctctagtagcttgtttatttagattatttagtacctcgttatctctcgctggacgtaaagagggaacaaagcatctaataggtgtcactcataagccgcctattattattgaccctgttacttctacctatgtattccctactgtcgcgccaagttcaacagattgtatttggatttttccacagcatattaaggattatcatgca

SEQ ID NO: 34691 - DNA, 260 bp, Unknown
  Description of Unknown: RightRegion for integrase B8692 sequence
atcggaagaattgttgtaacaaatgaggatgatttttttgtttatccaatttcgccataataatattaacctgccggaaagcgaacgccccggagctgggagagtaccacaccttcgatatagccgtatacggccagctctggcgggaacccgtcaccgtgcttcgggacgtcgcattggatggggatctggtgtttcgcatggtccgaacgttcaacaggtgtcacctctcaccgttacacctgaaggacgctgtactg

SEQ ID NO: 34692 - DNA, 260 bp, Unknown
  Description of Unknown: RightRegion for integrase B8693 sequence
aatttgataaaggaaattaagtttaataaagattttaaaatagatgtagatttcttataatattcgtgttcataactacatatagccaagtggttaaagttagatatgaacataaaagaaacccttgataatcctatgttatcaggggttttctaatgtaccatactataaaattttataattaattccattacttctttttcattgtatctatcttgtatcatttctaacacctcatgatattcaatttcttctttcac

SEQ ID NO: 34693 - DNA, 260 bp, Unknown
  Description of Unknown: RightRegion for integrase B8694 sequence
attgtaaaagaaattcggtggtttccagatcggcacttagaatttgatatcaacacataacgttattttttgagaaaaagtattatacaattaattcccctcagtggatgggtattgattgtataatactattgccccgccttaaagcgaggcaatagcttataatgcctgaatctttcgcattacgctgttgtaaacccgctcgtttacaatgcgcagcgtatccatcagctcatccacaaccgcccacgcctttgccg

SEQ ID NO: 34694 - DNA, 260 bp, Unknown
  Description of Unknown: RightRegion for integrase B8695 sequence
atagcagaagttagattaattaatgactttagagttatggtaataaccaatatattttagggagtttattatgataatttatgacaaaataaaaagcaagtatgatagatatgatatatatgagaaattcccgacaattacagcaagaaaaattctttttgaaagagatgttgtaagaatggatattatagctaaaaatatttccttagaggatataggttatactctccaagattatatacaggactatcataaggaca

SEQ ID NO: 34695 - DNA, 260 bp, Unknown
  Description of Unknown: RightRegion for integrase B8696 sequence
gcaatagataaaatagtaatagacaaagaaggaaaaattcaagtctattttaatttttaaaaattatttacatatgcaggcggatttgttattgtttctctcatgagaaagaaatttgtgaaagaatatcattggatagaagaaaaggaaatcctaaatcttatagcaattgctcaatcatctcctggttcgctatctattaatatatctatattagttggatataaattggcaggtattccaggtgcattgatctctat

SEQ ID NO: 34696 - DNA, 260 bp, Unknown
  Description of Unknown: RightRegion for integrase B8697 sequence
tctataatagattatatagaaatagataataacaaaaacatcactattaattttatataattatttggactaacatatagtatccactaggtccgagtaaacatagaaattccccttcttcaatatccaaactaatattatttaaaacctttttttggtcataacttttaaacacattatttatttttaagtaactcatatcttatctctccttatatagttatttttttattttaaattttatatcctactttttcttc

SEQ ID NO: 34697 - DNA, 260 bp, Unknown
  Description of Unknown: RightRegion for integrase B8698 sequence
tgtgttgaaaaggtagttatcacaggagatgacatagacatacattttagcatatattaataggtactttctcgtgttccaaccatcatcccaacagcggtaggaagtggagaaaaggaagaaaagaccaagattctattatatgattaagaaaaataaagacggtagttgaaaatataaatatatagattaagagaaaaagattttgaaaataattgaaatcttttatttttttgcctgattagtaaacgatataaaaa

SEQ ID NO: 34698 - DNA, 260 bp, Unknown
  Description of Unknown: RightRegion for integrase B8699 sequence
tgtgttgaaaaggtagttatcacaggagatgacatagacatacattttagcatatattaataggtactttctcgtgttccaaccatcatccctatgattatcggagaaatcagaaggtacatgagagataataattccataagagtcagccggtcactcagagacactgcatacaaggcaatttatgctaaggaaaactatatgaagaagaatcagaaagagcctacagtacaggaaatcgctgaggagatcggaatatc

SEQ ID NO: 34699 - DNA, 260 bp, Unknown
  Description of Unknown: RightRegion for integrase B8700 sequence
tgtgttgaaaaggtagttatcacaggcgatgacatagacatacattttagcatatattaataggtactttctcgcgttccaaccatcatcccaacagcggtaggaagtggagaaaaggaagaaaagaccgagattctattatatgattaagaaaaataaagacggacctgtaaaaagtaaatatatagattaagagaaaaaagattttgaaaataatcgaaatctttcattttttacttgactagtggacaccactatgc

SEQ ID NO: 34700 - DNA, 260 bp, Unknown; identical to SEQ ID NO: 34698
  Description of Unknown: RightRegion for integrase B8701 sequence

SEQ ID NO: 34701 - DNA, 260 bp, Unknown
  Description of Unknown: RightRegion for integrase B8702 sequence
tgtgttgaaaaggtagttatcacaggagatgacatagacatacattttagcatatattaataggtactttctcgtgttccaaccatcatcccaacagcggtaggaagtggagaaaaggaagaaaagaccaagattctattagatgattaagaaaaataaagacggacctgtaaaatgtaaatatatagattaagagaaaaagattttgaaaataattgaaatcttttatttttttacttgactagtggacaccactatgc

SEQ ID NO: 34702 - DNA, 260 bp, Unknown
  Description of Unknown: RightRegion for integrase B8703 sequence
tgtgttgaaaaggtagttatcacaggcgatgacatagacatacattttagcatatattaataggtactttctcgtgttccaaccatcatcccaacagcggtaggaagtggagaaaaggaagaaaaggccaagattctattatataattaagaaaataaaggcgggagccggaaatataaatatatagattaagagaaaaagattttgaaaataattgaaatcttttatttttttacttgactagtggacaccactgtgct

SEQ ID NO: 34703 - DNA, 260 bp, Unknown; identical to SEQ ID NO: 34698
  Description of Unknown: RightRegion for integrase B8704 sequence

SEQ ID NO: 34704 - DNA, 260 bp, Unknown
  Description of Unknown: RightRegion for integrase B8705 sequence
tgtgttgaaaaggtagttatcacaggagatgacatagacatacattttagcatatattaataggtactttctcgtgttccaaccatcatcccaacagcggtaggaagtggagaaaaggaagaaaagaccaagattctattatatgattaatatgataaagacaggagctgaaaatataaatatatagattaagagaaaaagattttgaaaataattgaaatcttttatttttttacttgacaagtggacaccactatgct

SEQ ID NO: 34705 - DNA, 260 bp, Unknown
  Description of Unknown: RightRegion for integrase B8706 sequence
tgtgttgaaaaggtagttatcacaggcgatgacatagacatacattttagcatatattaataggtactttctcgcgttccaaccatcatccctatgattatcggagaaatcagaaggtacatgagagataataattccataagagtcagccggtcactcagagacactgcatacaaggcaatttatgctaaggaaaactatatgaagaagaatcagaaagagcctacagtacaggaaatcgctgaggagatcggaatatc

SEQ ID NO: 34706 - DNA, 260 bp, Unknown
  Description of Unknown: RightRegion for integrase B8707 sequence
tgtgttgaaaaggttgttatcacgggagatgacatagacatacattttagcatatattaataggtactttctcgtgttccaaccatcatcccaatgatcattggagagatcagaaggtacatgagagataacaattccattcgtgtcagccggtcactcagagatacggcatataaagcaatctatgcaagggaaagttacagaaagaagaaccagaaagaaccgacggtgcaggaaattgcgacagaaattggcatatc

SEQ ID NO: 34707 - DNA, 260 bp, Unknown
  Description of Unknown: RightRegion for integrase B8708 sequence
tgtgttgaaaaggtagttatcacaggagatgacatagacatacattttagcatatattaataggtactttctcgtgttccaaccatcatcccaacagcggtaggaagtggagaaaaagaagaaaagaccaagattctattatatgattaaaaaaagcaaagacgtgagccggaaatataaatatatagattaagagaaaagattttgaaaataattgaaatcttttatttttttacttgactagtggacaccactgtgat

SEQ ID NO: 34708 - DNA, 260 bp, Unknown
  Description of Unknown: RightRegion for integrase B8709 sequence
tgtgttgaaaaggtggttatcacaggtgatgacatagacatacattttagcatatattaataggtactttctcgtgttccaaccatcatcccaacaacggtaggaagtggagaaaaggaagaaaagaccaagattctattatgcgattaagataataaagactgtagttgaaaatataaatatatagattaagagaaaaagattttgaaaataattgaaatcttttatttttttacttgactagtggacaccactatgct

SEQ ID NO: 34709 - DNA, 260 bp, Unknown
  Description of Unknown: RightRegion for integrase B8710 sequence
tgtgttgaaaaggtggttatcacaggtgatgacatagacatacattttagcatatattaataggtactttctcgtgttccaaccatcgtccctatgattatcggagaaatcagaaggtacatgagagataataattccataagagtcagccggtcactcagagacactgcatacaaggcaatttatgctaaggaaaactatatgaagaagaatcagaaagagcctacagtacaggaaatcgctgaggagatcggaatatc

SEQ ID NO: 34710 - DNA, 260 bp, Unknown
  Description of Unknown: RightRegion for integrase B8711 sequence
ataattgataaggttgttattgtcaatgatgatgtaaaaatttttttgagggatttttagcacatcattacgcacccccgatggcgtaagttagtgctaatgccgtacttatcgtggttttattttgttgaataacatcaactggcagtttcctgtcatgtttctgtcttaatacagtcagttatttgtcgctttgagcgactttttttatgcaaaaatataattgcaaggagggatgatttgtatgttttcagaagaaa

SEQ ID NO: 34711 - DNA, 260 bp, Unknown; identical to SEQ ID NO: 34699
  Description of Unknown: RightRegion for integrase B8712 sequence

SEQ ID NO: 34712 - DNA, 260 bp, Unknown
  Description of Unknown: RightRegion for integrase B8713 sequence
tgtgttgaaaaggtggttatcacagaagatgacatagacatacattttagcatatattaataggtactttctcgtgttcccaccatcatccctatgattatcggagaaatcagaaggtacatgagagataataattccataagagtcagccggtcactcagagacactgcatacaaggcaatttatgctaaggaaaactatatgaagaagaatcagaaagagcctacagtacaggaaatcgctgaggagatcggaatatc

SEQ ID NO: 34713 - DNA, 260 bp, Unknown
  Description of Unknown: RightRegion for integrase B8714 sequence
tgtgttgaaaaggtagttatcacaggagatgacatagacatacattttagcatatattaataggtactttctcgtgttccaaccatcatcccaacagcggtaggaagtggagaaaaggaagaaaagaccaagattctattatatgattaagataataaagacgagaaccggaaatataaatatatagattaagagaaaaagattttgaaaacaattgaaatcttttatttttttacttgactagtggacaccactgtgct

SEQ ID NO: 34714 - DNA, 136 bp, Unknown
  Description of Unknown: RightRegion for integrase B8715 sequence
tgtgttgaaaaggtagttatcacaggagatgacatagacatacattttagcatatattaataggtactttctcgcattccaaccatcatcccaacagcggtaggaagtggagaaaaggaagaaaaggccaagattc

SEQ ID NO: 34715 - DNA, 94 bp, Unknown
  Description of Unknown: RightRegion for integrase B8716 sequence
tgtgttgaaaaggttgttatcacgggagatgacatagacatacattttagcatatattaataggtactttctcgtgttccaaccatcatcccaa

SEQ ID NO: 34716 - DNA, 260 bp, Unknown
  Description of Unknown: RightRegion for integrase B8717 sequence
ataattgacaaaattgtaatagtcaatgggaatatcgaaattcagttaaagaatttttagcacttcctgtctgccgtgggtacggcgtatagcttgtgctaatgccgcatttatcgtgtttattttatcaaatgtcgctgaaacgtcactaaaatgtcgtttgtggcgtctttttttatgcaaaaattaaagcataaggaggggtatacaatgttttctgacgatgtactggaaaaaattttcgcaagagaagaattgca

SEQ ID NO: 34717 - DNA, 260 bp, Unknown
  Description of Unknown: RightRegion for integrase B8718 sequence
tgtgttgaaaaggtagttatcgcaggagatgacatagacatacattttagcatatattaataggtactttctcgtgttccaaccatcatccctatgattatcggagaaatcagaaggtacatgagagataataattccataagagtcagccggtcactcagagacactgcatacaaggcaatttatgctaaggaaaactatatgaagaagaatcagaaagagcctacagtacaggaaatcgctgaggagatcggaatatc

SEQ ID NO: 34718 - DNA, 260 bp, Unknown
  Description of Unknown: RightRegion for integrase B8719 sequence
tgtgttgaaaaggtagttatcacaggagatgacatagacatacattttagcatatattaataggtacattctcgtgttccaaccatcatccctatgattatcggagaaatcagaaggtacatgagagataataattccataagagtcagccggtcactcagagacactgcatacaaggcaatttatgctaaggaaaactatatgaagaagaatcagaaagagcctacagtacaggaaatcgctgaggagatcggaatatc

SEQ ID NO: 34719 - DNA, 260 bp, Unknown
  Description of Unknown: RightRegion for integrase B8720 sequence
tgcgttgaaaaggtagttatcacaggagatgacatagacatacattttagcatatattaataggtactttctcgtgttccaaccatcatccctatgattatcggagaaatcagaaggtacatgagagataataattccataagagtcagccggtcactcagagacactgcatacaaggcaatttatgctaaggaaaactatatgaagaagaatcagaaagagcctacagtacaggaaatcgctgaggagatcggaatatc

SEQ ID NO: 34720 - DNA, 260 bp, Unknown
  Description of Unknown: RightRegion for integrase B8721 sequence
tgtgttgaaaaggtagttatcacagaagatgacatagacatacattttagcatatattaataggtactttctcgtgttccaaccatcatcccaatgatcattggagagatcagaaggtacatgagagataacaattccattcgtgtcagccggtcactcagagatacggcatataaagcaatctatgcaagggaaagttacagaaagaagaaccagaaagaaccgacggtgcaggaaattgcgacagaaattggcatctc

SEQ ID NO: 34721 - DNA, 260 bp, Unknown
  Description of Unknown: RightRegion for integrase B8722 sequence
tgtgttgaaaaggtagttatcacaggtgatgacatagacatacattttagcatatattaataggtactttctcgtgttccaaccatcatcccaacagcggtaggaagtggagaaaaggaagaaaagaccaagattctattatatgattaagaaaagcaaagactagagttgaaaatataaatatatagattaagagaaaaagattttgaaaataattgaaatcttttatttttttcctgactagtaaatgatataaaaaa

SEQ ID NO: 34722 - DNA, 260 bp, Unknown
  Description of Unknown: RightRegion for integrase B8723 sequence
tgtgttgaaaaggtagttatcgcagaagatgacatagacatacattttagcatatattaataggtactttctcgtgttcccaccatcatcccaacagcggtaggaagtggagaaaaggaagaaaagaccaagattctattatatgattaagataataaagactggagccggaaatataaatatatagattaagagaaaaagattttgaaaataattgaaatcttttatttttttacttgactagtggacaccactgtgct

SEQ ID NO: 34723 - DNA, 260 bp, Unknown
  Description of Unknown: RightRegion for integrase B8724 sequence
tgtgttgaaaaggtggttatcacaggagatgacatagacatacattttagcatatattaataggtactttctcgtgttccaaccattatcccaacagcggtaggaagtggagaaaaggaagaaaagaccaagattctattatacgattaaaaaaataaagatgagaaccgaaaatataaatatatagattaagagaaaaagattttgaaaataattgaaatcttttatttttttgcctgactagtaaacgatataaaaac

SEQ ID NO: 34724 - DNA, 260 bp, Unknown
  Description of Unknown: RightRegion for integrase B8725 sequence
tgtgttgaaaaggtagttatcacaggagatgacatagacatacattttagcatatattaataggtactttctcgtgttccaaccatcatcccaacagcggtaggaagtggagaaaaggaagaaaagaccaagattctattatataattaagataataaagatgagagccgaaaatataaatacatagattaagagaaaaaagattttgaaaataattgaaatcttttatttttttgcttggctagtaaacgatataaaaa

SEQ ID NO: 34725 - DNA, 260 bp, Unknown
  Description of Unknown: RightRegion for integrase B8726 sequence
tgtgttgaaaaggtagtcatcacaggggatgatatagacatacattttagcatatattaataggtactttctcgtgttccaaccatcatcccaacagcggtaggaagtggagaaaaggaagaaaagaccaagattctattatatggttaagaaaaacaaagacgggagtcagaaatataaacagatagattaagagaaaaagattttgaaaataattgaaatcttttatttttttacttgactattggttaccaatatag

SEQ ID NO: 34726 - DNA, 260 bp, Unknown; identical to SEQ ID NO: 34698
  Description of Unknown: RightRegion for integrase B8727 sequence

SEQ ID NO: 34727 - DNA, 260 bp, Unknown
  Description of Unknown: RightRegion for integrase B8728 sequence
tgtgttgaaaaggtagttatcacagaagatgacatagacatacattttagcatatattaataggtactttctcgtgttccaaccatcatcccaatgatcattggagaaatcagaaggtacatgagagataacaattctattcgtgtcagccggtcactcagagatacggcatataaagcaatctatgcaagggaaagttacagaaagaggaaccagaaagaaccgacggtgcaggaaattgcgacagaaattggcatatc

SEQ ID NO: 34728 - DNA, 260 bp, Unknown
  Description of Unknown: RightRegion for integrase B8729 sequence
gttataaagaatatcacgatagacgaagacttaaatataactcttgtttttcggtcgtaactagactactcctgtcggagctgtcctttttgtaccataaaaaaaagactaggaattatcctagcctgtttgtattatttttcttgattagtgaatactataaatgcgtacgcacctctcattataaatactctttctttaataacttcctgactaagactaggttaccgcctagtcttttttattttcctctaaaatag

SEQ ID NO: 34729 - DNA, 260 bp, Unknown
  Description of Unknown: RightRegion for integrase B8730 sequence
tgtgttgaaaaggtagttatcacaggagatgatatagacatacattttagcatatattaataggtactttctcgtgttccaaccatcatccctatgattatcggagaaatcagaaggtacatgagagataataattccataagagtcagccggtcactcagagacactgcatacaaggcaatttatgctaaggaaaactatatgaagaagaatcagaaagagcctacagtacaggaaatcgctgaggagatcggaatatc

SEQ ID NO: 34730 - DNA, 260 bp, Unknown
  Description of Unknown: RightRegion for integrase B8731 sequence
tgtgttgaaaaggttgttatcacagaagatgacatagacatacattttagcatatattaataggtactttctcgtgttcagaccatcatcccaacagcggtaggaagtggagaaaaggaagaaaagaccaagattctattatatgattaagaaaataaagacgggagccggaaatataaatatatagattaagagaaaaagattttggaaataattgaaatcttttatttttttacttgactagtggacaccactgtgct

SEQ ID NO: 34731 - DNA, 260 bp, Unknown
  Description of Unknown: RightRegion for integrase B8732 sequence
tgcattgataaaatagtgattatgaatggaaatgttgaaatacatttccatactatttgatttacattttcccctatctattttggctcccgtagcgtaggaaaggggaaaaagataaaatggctaggttttactcgattattacttgatatttacgtgtttaagacggtttgaccgtcttattttattggataatttagatacaggagatgatcgtatgtttaaagatgaaattcttgaaaaaatatttgcagacaatg

SEQ ID NO: 34732 - DNA, 260 bp, Unknown
  Description of Unknown: RightRegion for integrase B8733 sequence
tgtgttgaaaaggtagttatcgcaggagatgacatagacatacattttagcatatattaataggtactttctcgtgttccaaccatcatcccaatgatcattggagagatcagaaggtacatgagagataacaattccattcgtgtcagccggtcactcagagatacggcatataaagcaatctatgcaagggaaagttacagaaagaagaaccagaaagaaccgacggtgcaggaaattgcgacagaaattggcatatc

SEQ ID NO: 34733 - DNA, 260 bp, Unknown
  Description of Unknown: RightRegion for integrase B8734 sequence
ataatagaatcaatagaggttagtgttgatggaaatatcactattaatttcttgccctaatttatgtgcctaactgatactttccgctgggatggttgtggacgacgaacactcgggcggcactgtagcgtaccgcccaatgaaaaatctcccgtgggtgagcgatcgactgattcaacgatccgatgaagatcgtttttttctgaatgatctcatttttcgtattcaaataaagccctagtaaatgctcttgacgacaa

SEQ ID NO: 34734 - DNA, 260 bp, Unknown
  Description of Unknown: RightRegion for integrase B8735 sequence
tgtgttgaaaaggtggttatcacaggagatgacatagacatacattttagcatatattaaataggtactttctcgtgttccaaccatcatcccaacaacggtaggaaatggagaaaaggaagaaaagaccaagattctattatatgattaagaaaaacaaagacgggagccggaaatataaatatatagattaatagaaaaagattttgaaaataattgaaatcttttatttttttgcctaactagtagacgatataaaa

SEQ ID NO: 34735 - DNA, 260 bp, Unknown
  Description of Unknown: RightRegion for integrase B8736 sequence
tgcgttgaaaaggtagttatcacaggagatgacatagacatacattttagcatatattaataggtactttctcgtgttccaaccatcatcccaacagcggtaggaagtggagaaaaggaagaaaagaccaagattctattatgcgattaagataataaagacggtagttgaaaatataaatatatagattaagagaaaaagattttgaaaataattgaaatcttttatttttttacttgactagtggacaccactatgat

SEQ ID NO: 34736 - DNA, 260 bp, Unknown
  Description of Unknown: RightRegion for integrase B8737 sequence
tgtgttgaaaaagtggttatcacaggtgatgacatagacatacattttagcatatattaataggcactttctcgtgttccaaccatcatccctatgattatcggagaaatcagaaggtacatgagagataataattccataagagtcagccggtcactcagagacactgcatacaaggcaatttatgctaaggaaaactatatgaagaagaatcagaaagagcctacagtacaggaaatcgctgaggagatcggaatatc

SEQ ID NO: 34737 - DNA, 260 bp, Unknown
  Description of Unknown: RightRegion for integrase B8738 sequence
tgtgttgaaaaggtagttatcacaggagatgacatagacatacattttagcatatattaataggtactttctcgtgttccaaccatcatcccaacggcggtaggaagtggagaaaaggaagaaaaggccaagattctattatatgattaagataataaagacgagaaccggaaatataaatatatagattaagagaaaaagattttgaaaacaattgaaatcttttatttttttacttgactagtggacaccactatggt

SEQ ID NO: 34738 - DNA, 260 bp, Unknown
  Description of Unknown: RightRegion for integrase B8739 sequence
tgtgttgaaaaggtggttatcacaggagatgacatagacatacattttagcatatattaataggtactttctcgtgttccaaccatcatcccaacagcggtaggaagtggagaaaaggaagaaaagaccaagattctattatatgattaagaaaaacaaagacgggaaccgaaaatataaatatatagattaatagaaaaagattttgaaaataattgaaatcttttatttttttacttgactagtggacaccactatgg

SEQ ID NO: 34739 - DNA, 260 bp, Unknown
  Description of Unknown: RightRegion for integrase B8740 sequence
tgtgttgaaaaggtagttatcacggaagatgacatagacatacattttagcatatattaataggtactttctcgtgttccaaccatcatcccaacagcggtaggaagtggagaaaaggaagaaaagaccaagattctattatatgattaaaaaaagcgaagacgggaaccggaaatataaatatatagattaagagaaaagattttgaaaataattgaaatcttttattttttacttgactagtggacaccactatgcta

SEQ ID NO: 34740 - DNA, 260 bp, Unknown
  Description of Unknown: RightRegion for integrase B8741 sequence
tgtgttgaaaaggtagtcataacaggtgatgacatagacatacattttagcatatattaataggtgctttctcgtgttccaaccatcatccctatgattatcggagaaatcagaaggtacatgagagataataattccataagagtcagccggtcactcagagacactgcatacaaggcaatttatgctaaggaaaactatatgaagaagaatcagaaagagcctacagtacaggaaatcgctgaggagatcggaatatc

SEQ ID NO: 34741 - DNA, 260 bp, Unknown; identical to SEQ ID NO: 34704
  Description of Unknown: RightRegion for integrase B8742 sequence

SEQ ID NO: 34742 - DNA, 260 bp, Unknown; identical to SEQ ID NO: 34719
  Description of Unknown: RightRegion for integrase B8743 sequence

SEQ ID NO: 34743 - DNA, 260 bp, Unknown
  Description of Unknown: RightRegion for integrase B8744 sequence
tgtgttgaaaaggtagttatcacagaagatgacatagacatacattttagcatatattaataggtattttctcgtgttccaaccatcatcccaacagcggtaggaagtggagaaaaggaagaaaagaccgagattctattatacgattaagaaaaataaagacggacctgtaaaaagtaaatatatagattaagagaaaaaagattttgaaaacaattgaaatcttttatttttttacttgactagtggacaccactatg

SEQ ID NO: 34744 - DNA, 260 bp, Unknown
  Description of Unknown: RightRegion for integrase B8745 sequence
tgtgttgaaaaggtagttatcacaggagatgacatagacatacattttagcatatattaataggtactttctcgtgttccaaccatcacgccaacagcggtaggaagtggagaaaaagaagaaaagaccaagattctattatatgattaagataataaagacgggagcctaaaatataaatacatagattaatagaaaagattttgaaaataattgaaatcttttatttttttacttgactagtggacaccactgtgata

SEQ ID NO: 34745 - DNA, 260 bp, Unknown
  Description of Unknown: RightRegion for integrase B8746 sequence
tgtgttgaaaaggtagttatcacaggagatgacatagacatacattttagcatatattaataggtactttctcgtgttccaaccatcatcccaacagcggtaggaagtggagaaaaggaagaaaaggccaagattctattatatgattaagataataaagacgggagttgaaaatataaatatatagattaagagaaaaagattttgaaaataattgaaatcttttattttttacttgactagtggacaccactatgcta

SEQ ID NO: 34746 - DNA, 260 bp, Unknown
  Description of Unknown: RightRegion for integrase B8747 sequence
tgtgttgaaaaggtagttatcacaggagatgacatagacatacattttagcatatattaataggtactttctcgcattccaaccatcatcccaacagcggtaggaagtggagaaaaagaagaaaagaccaagattctattatatgattaagataataaagacgggagcctaaaatataaatacatagattaatagaaaagattttgaaaataattgaaatcttttatttttttacttgactagtggacaccactgtgata

SEQ ID NO: 34747 - DNA, 260 bp, Unknown; identical to SEQ ID NO: 34713
  Description of Unknown: RightRegion for integrase B8748 sequence

SEQ ID NO: 34748 - DNA, 260 bp, Unknown
  Description of Unknown: RightRegion for integrase B8749 sequence
tgtgttgaaaaggtggttatcacaggcgatgacatagacatacattttagcatatattaataggtactttctcgtgttccaaccatcatcccaacagcggtaggaagtggagaaaaggaagaaaaggccaagattctattatataattaagaaaaataaagacggacctgtaaaatgtaaatatatagattaagagaaaaagattttgagaataattgaaatcttttattttttacttgaccagtggacaccactgtgct

SEQ ID NO: 34749 - DNA, 260 bp, Unknown; identical to SEQ ID NO: 34712
  Description of Unknown: RightRegion for integrase B8750 sequence

SEQ ID NO: 34750 - DNA, 260 bp, Unknown
  Description of Unknown: RightRegion for integrase B8751 sequence
tgtgttgaaaaggtggttatcacaggtgatgacatagacatacattttagcatatactaataggtattttctcgtgttccaaccatcatcccaatgatcattggagagatcagaaggtacatgagagataacaattccattcgtgtcagccggtcactcagagatacggcatataaagcaatctatgcaagggaaagttacagaaagaagaaccagaaagaaccgacggtgcaggaaattgcgacagaaattggcatctc

SEQ ID NO: 34751 - DNA, 109 bp, Unknown
  Description of Unknown: RightRegion for integrase B8752 sequence
agcattataaaagaaatcatttacaatgaagataaaagctttgttatttattttatttaatacgtttactttctcattagttacatcaggaataacaagaagtaaaatc

SEQ ID NO: 34752 - DNA, 92 bp, Unknown
  Description of Unknown: RightRegion for integrase B8753 sequence
tgtgttgaaaaggtagttatcacaggagatgacatagacatacattttagcatatattaataggtactttctcgtgttccaaccatcatccc

SEQ ID NO: 34753 - DNA, 91 bp, Unknown
  Description of Unknown: RightRegion for integrase B8754 sequence
tgtgttgaaaaggtagttatcacaggtgatgacatagacatacattttaacatatattaataggtgctttctcgtgttccaaccatcatcc

SEQ ID NO: 34754 - DNA, 260 bp, Unknown
  Description of Unknown: RightRegion for integrase B8755 sequence
tgtgttgaaaaggtggttatcacaggtgatgacatagacatacattttagcatatactaataggtattttctcgtgttccaaccatcatcccaacagcggtaggaagtggagaaaaggaagaaaagaccaagattctattatatgattaagaaaaataaagacgggagccgaaaatataaatatatagattaaaagaaaaagattttgaaaataattgaaatcttttattttttgcctgactagtaaacgatataaaaga

SEQ ID NO: 34755 - DNA, 260 bp, Unknown
  Description of Unknown: RightRegion for integrase B8756 sequence
tgtgttgaaaaggtagttatcacaggtgatgacatagacatacattttagcatatattaataggtactttctcgtgttccaaccatcatcccaacagcggtaggaagtggagaaaaggaagaaaagaccaagattctattatatgattaagaaaaataaagacggtagttgaaaatataaatatatagattaagagaaaaagattttgaaaataattgaaatcttttatttttttacttgactagtggacaccactgtga

SEQ ID NO: 34756 - DNA, 260 bp, Unknown
  Description of Unknown: RightRegion for integrase B8757 sequence
tgtgttgaaaaggtagttatcacaggagatgacatagacatacattttagcatatattaataggtactttctcgtgttcccaccatcatcccaacagcggtaggaagtggagaaaaggaagaaaagaccaagattctattatatgattaagaaaaataaagacggtagttgaaaatataaatatatagattaagagaaaaagattttgaaaataattgaaatcttttatttttttgcctgactagtaaatgatataaaaa

SEQ ID NO: 34757 - DNA, 260 bp, Unknown
  Description of Unknown: RightRegion for integrase B8758 sequence
gtaatccggcagataatcgttgacgataacatgattgtgattgatgttatttttttataacgcttttggttacattatgtgacggttgcttgagcaaacaacaattaaagtagtacataaaatcccccgccggatctgctccgatgggggattcatttttatgctgccaggtactttcttgtggtcttacccgccagtccgtctgccgtaatcttgcaggacttctgatattcaatgatagctgctacggttttacgacc

SEQ ID NO: 34758 - DNA, 260 bp, Unknown
  Description of Unknown: RightRegion for integrase B8759 sequence
attaaagatattcaggtggatccggaaacccgcaaactatgcggttttcatttttactgatttaggagtagtatttatcgcgcactgtagaattcgagccccacgccacctctcttgaagaaaagggcgatggctacgtcgttgcttccttgggagaaagctccggctatgttccttacacggcgttcagtgcaaagaaaagctatattgaaaacaatcctgaaattatccagtcctttaccaatgcactgcaaaagggc

SEQ ID NO: 34759 - DNA, 260 bp, Unknown
  Description of Unknown: RightRegion for integrase B8760 sequence
gtaatccgacagataatcgttgacgataacatgaatgtgattgatgttatttttttataacgcttttggttaccttatatgacggttgcttgagcaagcaataattaaggtagtacataaaatcccctaccggatctgctccgatgggggattaaaactatgctgccaggtactttcttgtggtcttgcccgccagtccgtcggctgtgatcttgcaggacttctgatatgtaatgattgctgctacggtcttggaaccg

SEQ ID NO: 34760 - DNA, 260 bp, Unknown
  Description of Unknown: RightRegion for integrase B8761 sequence
gtgatccggcagataatcgttgacgataacatgaatgtaattgatgttatttttttataacgcttttggttaccttatgtgacgtttgcttgagcaagcaacaattaaggcagtacataaatcccccgccggatatgctccgatgggggattgcttcttaattataaaatactgcctgtatgctgttgtatccaacttttccgtcttttaccaagtttagctttccctgcactgcaatggtctcttttcgcgcatctttt

SEQ ID NO: 34761 - DNA, 260 bp, Unknown; identical to SEQ ID NO: 34759
  Description of Unknown: RightRegion for integrase B8762 sequence

SEQ ID NO: 34762 - DNA, 260 bp, Unknown
  Description of Unknown: RightRegion for integrase B8763 sequence
gtaatccggcagataatcgttgacgataacatgaatgtaattgatgttatttttttataacgcttttggttaccttatatgatggttgcttgagcaagcaacagttaaggcagtacataaatcccccgccggatatgctccgatgggggattaaaactatgctgccaggtactttcttgtggtcttgcccgccagtccgtcggctgtgatcttgcaggacttctgatatgtaatgattgctgctacggtcttggaaccgc

SEQ ID NO: 34763 - DNA, 260 bp, Unknown
  Description of Unknown: RightRegion for integrase B8764 sequence
gtaatccggcagataatcgttgacgataacatgaatgtaattgatgttatttttttataacgcttttggttaccttatatgatggttgcttgagcaagcaacagttaaggcagtacataaatcccccgccggatatgctccgatgggggattaaaactatgctgccaagtactttcttgtggtcttacccgccagtccgtctgcagtaatcttgcaggacttctgatatgtcaggattgctgctacggtcttacgaccgc

SEQ ID NO: 34764 - DNA, 260 bp, Unknown
  Description of Unknown: RightRegion for integrase B8765 sequence
gtaatccggcagatagtcgttgacgataacatgaatgtaattgatgttatttttttataacgcttttggttgccttatgtgacggttgcttgatcaaacaacaattaaggcagtacataaaatcccccgccggatctgatccgatgggggattgcttcttaattataaaataccgcctgtatgctgttgtatccaacttttccgtcttttaccaagttcagcttgccctgcactgcaatggtctcttttcgcgcatcttt

SEQ ID NO: 34765 - DNA, 260 bp, Unknown
  Description of Unknown: RightRegion for integrase B8766 sequence
gtgatccggcagataatcgttgacgataacatgaatgtaattgatgttatttttttataacgcttttggttaccttatgtgacggttgcttgagcaagcatcagttaaagtagtgcataaaatcccccgccggatctgctccgatgggggattgcttcttaattataaaataccgcctgtatgctgttgtatccaacttttccgtcttttaccaagtttagcttgccctgcactgaaatggtctcttttcgcgcatcttt

SEQ ID NO: 34766 - DNA, 260 bp, Unknown
  Description of Unknown: RightRegion for integrase B8767 sequence
gtgatccgacagataatcgttgataataacatgaatgtgattgatgttatttttttataacacttttggttaccttatgtgacggttgcttgagcaaacaacaattaaggcagtacataaatcccccgccggatattctccgatggggaattgcttcttaattataaaatactgcctgtatgctgttgtatccaacttttccgtcttttaccaggttcagcttgtcctgcactgcaatggtctcttttctcgtatctttt

SEQ ID NO: 34767 - DNA, 260 bp, Unknown
  Description of Unknown: RightRegion for integrase B8768 sequence
agtgtaattaagcgtataatcataaaagataagcaaatacaggaaataatattcaaataaaaatagccccaagcgttgaatttaacgcctggggctttagtatgtacttatttaactattccattgggtcccaaaagcccaacaatttctccttttttaaaatataaatttagcttatctaaaacaagtttatttttgtatgcaatagataaatttttaatctctaacattagtccacctcccaaaatttatcaagacca

SEQ ID NO: 34768 - DNA, 260 bp, Unknown
  Description of Unknown: RightRegion for integrase B8769 sequence
attaaagatattcaggtagatccggaaacccgcaaactatgcggttttcatttttactgatttaggagtagtatttatcacgcactgtagagtttgagccccacgccacctctcttgaagaaaaaggcgatggctacgtcgttgcttccttaggagaaagctccggctatgttccttacacggcgttcagtgcaaagaaaagctatattgaaaacaatcctgaaattatccagtcctttaccaatgcgctgcaaaagggc

SEQ ID NO: 34769 - DNA, 260 bp, Unknown
  Description of Unknown: RightRegion for integrase B8770 sequence
gtaatccggcagataatcgttgacgataacatgaatgtgattgatgttatttttttataacacttttggttaccttatgtgacgtttgcttgagcaagcaataattaaggtagtacataaaatcccccaccggatctgctccgatgggggattaaaactatgctgccaggtactttcttgtggtcttacccgccagtccgtctgctgtaatcttgcaagacttctgatatgtaatgatagctgatacggtcttacgaccg

SEQ ID NO: 34770 - DNA, 260 bp, Unknown
  Description of Unknown: RightRegion for integrase B8771 sequence
gtgatccggcagataatcgttgatgataacatgaatgtgattgatgttatttttttataacgcttttggttaccttatgtgacggttgcttgagcaagcatcagttaaggtagtacataaaatcccccgccggatctgctccgatgggggattgcttcttaattataaaataccgcctgtatgctgttgtatccaacttttccgtcttttaccaagttcagcttgccctgcactgcaatggtctcttttcgcgcattttt

SEQ ID NO: 34771 - DNA, 260 bp, Unknown
  Description of Unknown: RightRegion for integrase B8772 sequence
attaaagatattcaggtggatccggaaacccgcaaactatgcggttttcatttttactgatttaggagtagtatttatcgcgcactgtagagtttgagccccacgccacctctcttgaagaaaaaggcgatggctacgtcgttgcttccttaggagaaagctccggctatgttccttacacggcgttcagtgcaaagaaaagctatattgaaaacaatcctgaaattatccagtcctttaccaatgcactgcaaaagggc

SEQ ID NO: 34772 - DNA, 260 bp, Unknown
  Description of Unknown: RightRegion for integrase B8773 sequence
attaaagatattcaggtggatccggaaacccgcaaactatgcggttttcatttttactgatttaggagtagtatttatcgcgcactgtagaattcgagccccacgccacctctcttgaagaaaagggcgatggctacgtcgttgcttccttgggagaaagctccggctatgttccttacacggcgttcagtgcaaagaaaagctatattgaaaacaatcctgaaattatccagtcctttaccaatgcgttgcaaaagggc

SEQ ID NO: 34773 - DNA, 260 bp, Unknown; identical to SEQ ID NO: 34762
  Description of Unknown: RightRegion for integrase B8774 sequence

SEQ ID NO: 34774 - DNA, 260 bp, Unknown; identical to SEQ ID NO: 34764
  Description of Unknown: RightRegion for integrase B8775 sequence

SEQ ID NO: 34775 - DNA, 145 bp, Unknown
  Description of Unknown: RightRegion for integrase B8776 sequence
gtgatccggcagataatcgttgatgataacatgaatgtgattgatgttatttttttataacgcttttggttaccttatatgatggttgcttgatcaagaagcaggaagagcagatgaaataagctctgtctgaagcttcgcaatc

SEQ ID NO: 34776 - DNA, 260 bp, Unknown
  Description of Unknown: RightRegion for integrase B8777 sequence
attaaagatattcaggtggatccggaaacccgcaaactatgcggttttcatttttactgatttaggagtagtatttatcgcgcactgtagagtttgagccccacgccacctctcttgaagaaaaaggcgatggctacgtcgttgcttccttaggagaaagctccggctatgttccttacacggcgttcagtgcaaagaaaagctatattgaaaacaatcctgaaattatccagtcctttaccaatgcgttgcaaaagggc

SEQ ID NO: 34777 - DNA, 260 bp, Unknown
  Description of Unknown: RightRegion for integrase B8778 sequence
gtgatccggcagataatcgttgacgataacatgaatgtaattgatgttatttttttataacgcttttggttaccttatgtgacgtttgcttgatcaagaagcaggaagagcagatgaaataagctctgccggaatcctcggaatcgacaggaacaaaaaagaagctgtacagagaatccctctgtacagcttcttaactgtgttcatcttatttattattcaccgaagactgctctgtaatctgcctggaacttggcaat

SEQ ID NO: 34778 - DNA, 260 bp, Unknown
  Description of Unknown: RightRegion for integrase B8779 sequence
gtgatccggcagataatcgttgacgataacatgaatgtaattgatgttatttttttataacgcttttggttaccttatgtgacgtttgcttgagcaagcaacaattaaggcagtacataaatcccccgccggatctgctccgatgggggattgcttcttaattataaaataccgcctgtatgctgttgtatccaacttttccgtcttttaccaagttcagcttgccctgcactgcaatggtctcttttcgcgcatctttt

SEQ ID NO: 34779 - DNA, 260 bp, Unknown
  Description of Unknown: RightRegion for integrase B8780 sequence
attaaagctattcaggtggatccggaaacccgcaaactatgcggttttcatttttactgatttaggagtagtatttatcgtgcactgtagagtttgaaccccacgccacctctcttgaagaaaaaggcgatggctacgtcgttgcttccttaggagaaagctccggctatgttccttacacggcgttcagtgcaaagaaaagctatattgaaaacaatcctgaaattatccagtcctttaccaatgcgctgcaaaagggc

SEQ ID NO: 34780 - DNA, 260 bp, Unknown
  Description of Unknown: RightRegion for integrase B8781 sequence
aaaaacttaattgtagaccctcatggcaaaataacaattaattttttaacaaaaaattagccacttttaggaactgtcctactagtaacgcttggcgctatcaatgcaacagccattaaaaaatgcatgccccacttcacttttttaaagctcaactttttcacaaatttcctccttgtgtttcaacccatttgcaacaaacaattgtcaaagtaacaaacaacaaaaagagccttcccccatcacgctgctcttctttt

SEQ ID NO: 34781 - DNA, 260 bp, Unknown
  Description of Unknown: RightRegion for integrase B8782 sequence
tgcgttgaagatatagtggttgacaaggacgaaattacgattcgttttgttactttataatatacttcaactttctaactatcattggaccgaaatatagaaagttgaaattcataaatggctaggtttttattctgttttactaataatatactgataatttgcgataatttgacggtttaaccgtctttttttatgcgaaaatttaagtggaaggaggatgaggtatgttttctgatgaagttttagaaaagattttt

SEQ ID NO: 34782 - DNA, 260 bp, Unknown
  Description of Unknown: RightRegion for integrase B8783 sequence
tgtgtagaaaaaataataataaaagggagcgacatagaagtcagcttcgttactttttaatatatttctgcttcctatattcattcctgcgattataggaagacgaaaaagctgaaatggctagtttttattctatttttacagtttgtatatagttattttgctgatataggacggttttgccgtctttttttatgccaaaatgtaagcagaaggagggagaaaagaatgttttcagatgaaattttagaaaagatttt

SEQ ID NO: 34783 - DNA, 260 bp, Unknown
  Description of Unknown: RightRegion for integrase B8784 sequence
aggctaatacaagagattaagttagatggaaagaccatcaaacgggtcatatttttttaaataaaaatccggtgtatctgtacatagtcaactgacgttgtccggttacacctgaaaaataaaaggagtagaaacctatgcgtgacaaggatttgaagagtaaagaggaaagaatatgggagatgtacattaaagcttatatatcagagaaacaattttacaagatgttagaacgtattaagaaagaggtgaaaacagat

SEQ ID NO: 34784 - DNA, 109 bp, Unknown
  Description of Unknown: RightRegion for integrase B8785 sequence
aaaaacttacttgtagaccctcatggcaaaataacaattaattttttaacaaaaaattagccacttttaggaaatgtcctactagtaacgcttggcgctatcaacgcaa

SEQ ID NO: 34785 - DNA, 260 bp, Unknown
  Description of Unknown: RightRegion for integrase B8786 sequence
tgcattgaaaggattgttattaacggaaacgatatagaaattcgttttgttactttttaatagatttttcaacttacctactgttgctccaatgatatcaggtgaaatccggagatttttgcgggatgacggcatgattaaggtaagccgttctttaaaagaactggcaggaaaagtatttcttgtaaaagaagaattatcggactgttatggacgggatccaaccgtagaagagattgcagggaagcttggggtaagca

SEQ ID NO: 34786 - DNA, 260 bp, Unknown
  Description of Unknown: RightRegion for integrase B8787 sequence
tgcgttgaagatatagtggttgacaaggacgaaattacgattcgttttgttactttgtaatatacttcaactttctaagtatcgctggaccgaaatatagaaagttgaaattcataaatggataggtttttattctgttttactaataatatactgataatttgcgataatttgacggtttaaccgtctttttttatgcgaaaatttaagtggaaggaggatgaggtatgttttctgatgaagttttagaaaagattttt

SEQ ID NO: 34787 - DNA, 260 bp, Unknown
  Description of Unknown: RightRegion for integrase B8788 sequence
aaaaacttaattgtagaccctcatagcaaaataacaattaattttttaacaaaaaattagccacttttaggaactgtcctactggataattccatttaacgcaaacaaaaaacctcgttccctagaagagagcgaggtttttttatggaccatacaggactcgaacctgtgaccgaacggttatgagccgtttgctctaaccaactgagctaatggtcctgaaaaaacgctctgcctttaaagcagagcgtttcgaatac

SEQ ID NO: 34788 - DNA, 260 bp, Unknown
  Description of Unknown: RightRegion for integrase B8789 sequence
aaaaacttaattgtagaccctcatggcaaaataacaattaattttttaacaaaaaattagccacttttaggaactgtcctactggatatttccatttagcgcaaacaaaaaaacctcgttccctagaagagagcgaggttttttatggaccatacaggactcgaacctgtgaccgaacggttatgagccgtttgctctaaccaactgagctaatggtcctgaaaaaatacctcttaaataataagaggtattaataaatt

SEQ ID NO: 34789 - DNA, 260 bp, Unknown
  Description of Unknown: RightRegion for integrase B8790 sequence
ttcatcaaagagctccatatctaccgggggaccatccagggcccgccgattttttggtgattttttgttgtagttattgacaggaatagaacgcccttggatattccacccgcacactggacggcatcttcggcgccaacaccgagaacgcgctgaaagcattccagcgtgcggtggggcttaccgccgacggcatctgcggctgccgttcctggaaaaagctcactgctgctgtagtgggaatcggccgcaccaaaacg

SEQ ID NO: 34790 - DNA, 260 bp, Unknown
  Description of Unknown: RightRegion for integrase B8791 sequence
aggctgatacaagagattaagttagatggaaagaccatcaaacgggtcatatttttttaaataaaaatccggtgtatctgtacatagtcaactgacgttgtccggttacaccggaaaaataaaaggagtagaaacctatgcgtgacaaggatttgaagagtaaagaggaaagaatatgggagatgtacattaaagcttatatatcagagacacagttttacaagatgttagaacgtattaagaaagaggtgaaaacagat

SEQ ID NO: 34791 - DNA, 260 bp, Unknown
  Description of Unknown: RightRegion for integrase B8792 sequence
ttccttaaagaattgcacatctaccgcggcacaattcaaggcccgcctatttttctataatccagttgtagttattgacatagatagaacgcacttggatattctacttgcacgctggacggcattttcggcaataatacagagaccgccctcaaggccttccagcgctctgtcggcctcaccgcagacggcatctgcggctgcaattcctggaaaaagctcacaagcgccgtggtgggcatcggccgcaccaggactgt

SEQ ID NO: 34792 - DNA, 260 bp, Unknown
  Description of Unknown: RightRegion for integrase B8793 sequence
ttgattgattacattgaagttgacaagcaaaagaacatgacgatttatttcaggcggtagaaaccgcctttttaatcgtcttttatgttggtaagtatgaaaaacgcttcctgcggagtgtgatttttatttacatacaggcaatttttttatgaagcttataaactatatcaaaaaaaagaaaaaagatcaatttacagatatttttctaaaaactgtgcaaagaaaacctatgaaataagaattttgaatcaaaagtt

SEQ ID NO: 34793 - DNA, 260 bp, Unknown
  Description of Unknown: RightRegion for integrase B8794 sequence
tgcgttgaagatatagtggttgacaaggacgaaattacgattcgttttgttactttataatatacttcaactttctaagtatcgctggaccgaaatatagaaagttgaaattcataaatggataggtttttattctgttttactaataatatactgataatttgcgataatttgacggtttaaccgtctttttttatgcgaaaatttaagtggaaggaggatgaggtatgttttctgatgaagttttagaaaagattttt

SEQ ID NO: 34794 - DNA, 260 bp, Unknown
  Description of Unknown: RightRegion for integrase B8795 sequence
tgtgtagaaaaaataataataaaagggagcgacatagaagtcagcttcgttactttttaatatatttctgcttcctatattcattcccgcgattataggaagacgaaaaagctgaaatggctagtttttattctatttttacagtttgtatatagttattttgctgatataggacggttttgccgtctttttttatgccaaaatgtaagcagaaggagggagaaaagaatgttttcagataaaattttagaaaagatttt

SEQ ID NO: 34795 - DNA, 260 bp, Unknown
  Description of Unknown: RightRegion for integrase B8796 sequence
ttccttaaagaattgcacatctaccgcggcacaattcaaggcccgcctatttttctataatccggttgtagttattgacatagatagaatgcgcttgggtactctacccgcacgctggacggcattttcggcaacaataccgaaacggccctcaaggcgtttcagcgctcggtgggcctcacggcagacggcatctgcggctgcaattcctggaaaaagcttaccagcgccgtggtgggcattggccgcacccaaaccgt

SEQ ID NO: 34796 - DNA, 135 bp, Unknown
  Description of Unknown: RightRegion for integrase B8797 sequence
tgcgttgaagatatagtggttgacaaggacgaaattacgattcgttttgttactttgtaatatacttcaactttctaaatatcattggaccgaaatatagaaagttgaaattcataaatggctaggtttttattc

SEQ ID NO: 34797 - DNA, 260 bp, Unknown; identical to SEQ ID NO: 34782
  Description of Unknown: RightRegion for integrase B8798 sequence

SEQ ID NO: 34798 - DNA, 260 bp, Unknown
  Description of Unknown: RightRegion for integrase B8799 sequence
tctgttataaaagaaattcaaattgacgatcgtagaaatttaaaggtcatttttttatgacttttttgtagtagtaactatgagcagcctgtcggttcatcagccaggacgattgcaggctttgacaccaaagcgcgggcaatggctacgcgctgctgctggccgccggaaaggttattgggcatattgttcagcttatcctccagccccagcatctgaacgacttctttcataaacttcttgtctaccttgtttccgtc

SEQ ID NO: 34799 - DNA, 260 bp, Unknown
  Description of Unknown: RightRegion for integrase B8800 sequence
agaacggtgcagcgcatcgaggcggatgataacggtgcgttttttgtaacgccagtttaggcatattttctcttagcattaggcaacagcaaatatacctaaaacgaaaacgtgagctaaaccggcggttatatgtcgatttagcccacgtctttgattaaatcctatctattttgcgcatgacattatcatagacgcgcctgttggtgattgcaaggctgtccatcaactcgtccatgatgggccacagcttatcaggc

SEQ ID NO: 34800 - DNA, 145 bp, Unknown
  Description of Unknown: RightRegion for integrase B8801 sequence
tctgttataaaagaaattcaaattgacgatcgtagaaatttaaaggtcatttttttatgacttttttgtagtagtaactaagagtatcctgttggttattcttagttactactactaattatggttcctgattgtttcaggagct

SEQ ID NO: 34801 - DNA, 260 bp, Unknown
  Description of Unknown: RightRegion for integrase B8802 sequence
tgcattgagaaagttgtgattagtggtaacgatttggagatacgttttatcacattttgatagatttcaacttacctacagtaagccccgtgagtgtgggtaagacgaaaaacagaaatggctaggtatttattctatttttactaataatttactgataatgtgcgacaacttgacggtttaaccgtctttttttgtgcgaaaatttaattagaaggaggatgagatatgttttcggatgaagttttagaaaagatttt

SEQ ID NO: 34802 - DNA, 260 bp, Unknown
  Description of Unknown: RightRegion for integrase B8803 sequence
tgtatagagagaattatcattacagggagcgatatagaaattcgcttcattactttataatatattctcccatatcttactatcgcgggagcgaacgttagaaaggggagaaaaccggaaatggctaggttttattctatttttactgtttacatattgttattttgaagagttgagacggttttgccgtctttttttatgccagaatataagcagaaggagggagaaaagaatgttttcagatgaaattttagaaaaga

SEQ ID NO: 34803 - DNA, 260 bp, Unknown
  Description of Unknown: RightRegion for integrase B8804 sequence
agaacagtgaagcgcatcgaagcggatgataacggtgcgttttttgtaacgcctgtttaggtgtattttctctttagattaggcaacagcaaatatacctaaaatgaaaacgtgagctaaaccggcggttatatgtcgatttagcccacgttttttgattaaatcctatctattttgcgcatgacattatcatagacgcgcctgttggtgattgcaaggctgtccatcaactcgtccatgatgggccacagcttatcggg

SEQ ID NO: 34804 - DNA, 260 bp, Unknown
  Description of Unknown: RightRegion for integrase B8805 sequence
tgcatagacaagattgtgattactgacggaaatatagacatctattttaatttgctctaatttccctttcctataatcgtcccgatgattataggaagtagaaataaccagaattgaccgagaatctatcgaaaaaaacagcggaaaatgcgagatcgcaatgtaaaactaactgtaaggataatgttagctgcctagataaagaaaaagatatagaaagagataaatataatactgtggggagaaagttccacattatt

SEQ ID NO: 34805 - DNA, 260 bp, Unknown; identical to SEQ ID NO: 34507
  Description of Unknown: RightRegion for integrase B8806 sequence

SEQ ID NO: 34806 - DNA, 260 bp, Unknown
  Description of Unknown: RightRegion for integrase B8807 sequence
tctgttataaaagaaattcaaattgacgatcgtagaaatttaaaggttatttttttatgacttttttatagtagtaactaagagtatcctgttggttattcatagttactactaccaaatacagctcctgattatttcaggagctgtattctgtttatcaaattgcaatcagatctttccatgttgccggtccgcacactccgtcaacttcaaggactccgtttctgtccttctggtatgctttaagcgcatagattgta

SEQ ID NO: 34807 - DNA, 260 bp, Unknown
  Description of Unknown: RightRegion for integrase B8808 sequence
tctgttataaaagaaattcaaattgacgatcgtagaaatttaaaggtcatttttttatgacttttttgtagtagtaactatgaacagcctgttggttattcttagttactactaccaattatggttcctgattgtttcaggagctttttgttaaattgcaatcagatctttccatgttgccggtccacatactccgtcaacctcaaggactccgtttctgtctttctgatatgccttgagtgcataaattgtattgtctc

SEQ ID NO: 34808 - DNA, 260 bp, Unknown
  Description of Unknown: RightRegion for integrase B8809 sequence
cgcactatcagaaggattgaaattgatggtaagaaggtgactaaggtattttttgtgtaattttttttacgtttctcgttgctattatgttaccttgccatctgtaatagtgacataatagcaactagttaaataatatcaataaaaaacaccgatttagtgcaaatatatactttacaaagtaccgaatcggtgctatactatagccataacaaagaaaggaactaccaaaggtagtaaggtaaaggaaaatgagaaac

SEQ ID NO: 34809 - DNA, 260 bp, Unknown
  Description of Unknown: RightRegion for integrase B8810 sequence
tctgttataaaagaaattcaaattgacgatcgtagaaatttaaaggtcatttttttatgacttttttgtagtagtaactatgagcagcctgttggctcgtctgccagaatcagagaaggacgggtaatcaatgcacggccaatcgccactctctgctgttgaccgccggaaagctgactgggtaaatgattacgacgatctttcaaattcaaaaccgtcagcagttcctccaaatatctcttgtccggcttttgataatc

SEQ ID NO: 34810 - DNA, 142 bp, Unknown
  Description of Unknown: RightRegion for integrase B8811 sequence
tctgttataaaagaaattcaaattgacgatcgtagaaatttaaaggtcatttttttatgactttttttgtagtagtaactatgagcagcctgttggctcgtctgccagaatcagagaaggacgggtaatcaatgcgcggcca

SEQ ID NO: 34811 - DNA, 146 bp, Unknown
  Description of Unknown: RightRegion for integrase B8812 sequence
tctgttataaaagaaattcaaattgacgatcgtagaaatttaaaggtcatttttttatgactttttttgtagtagtaactatgagcagcctgtcggctcgtcggccagcacaatagccggtttggtaatcagggcgcgggcaatcg

SEQ ID NO: 34812 - DNA, 92 bp, Unknown
  Description of Unknown: RightRegion for integrase B8813 sequence
cgcaccatcagaaggattgaaattgatggtaagaaggttactaaggtattttttgtataatttttttatcctttttgttgctattatgtcac

SEQ ID NO: 34813 - DNA, 260 bp, Unknown
  Description of Unknown: RightRegion for integrase B8814 sequence
gaacgtataatagaaagaattgtgatccgtgataaagacgtggagatttatttcaaataaacgtttatagtgaaaggctattctattattctttcgaatgataaaatagccttttttcgagtgcgttacttgatttaaaatcaaggcgattgtatattatatatagagagggatacaagaaaggagctgaaagaaatgaataagaagtttgaagcattggttttagtaaacggcaagacactaaccgagttcaaagggaa

SEQ ID NO: 34814 - DNA, 260 bp, Unknown
  Description of Unknown: RightRegion for integrase B8815 sequence
tctgttataaaagaaattcaaattgacgatcgtagaaatttaaaggtcatttttttatgacttttttgtagtagtaactatgagcagcctgttggttcatcagccagaataatggcgggcttcgccgcaagtgccctagcaatcgcagccctctgctgctgtccaccggataatgttccaggaagagcttccctcttctctgacagccctaaaagttccagtatcccatccacatactccacatcaacctttctcccatc

SEQ ID NO: 34815 - DNA, 260 bp, Unknown
  Description of Unknown: RightRegion for integrase B8816 sequence
cgtactatcaggcgtattgagatcgatggaaagaaggtgtctaaggtgttttttatataatttttttattctttttgttgctattatgtcaccttgccacttgtaatagtaacataatagcaactaattaaataatatcaatatatcacacaatgtatgatatttttatcactatacaagtcacacattgtgtgatattatatagacataacaaagaaaggaactaccaaaggtagtaaggtaaaatgaaatgagaaacg

SEQ ID NO: 34816 - DNA, 260 bp, Unknown
  Description of Unknown: RightRegion for integrase B8817 sequence
tctgttataaaagaaattcaaattgacgatcgtagaaatttaaaggtcatttttttatgacttttttgtagtagtaactatgagcagcctgtcggctcgtcggccagcacaatagccggtttggtaatcagggcgcgtgcgatagccacacgctgctgctgtccgccggaaagattgttgggcatatttttcagtttatcttccaaccccagcaggtgaacgatctcgtccaaaaacttctgatccaccgtgtccccgtc

SEQ ID NO: 34817 - DNA, 260 bp, Unknown
  Description of Unknown: RightRegion for integrase B8818 sequence
tgcattgagaaagttgtgattagtggtaacgatttggagatacgttttatcacattttgatagatttcaacttacctacagtaagcccaatgatatcaggtgaaatccggagatttttgcgggatgacggcatgattaaggtaagccgttctttaaaagaactggcaggaaaagtatttcttgtaaaagaagaattatcggactgttatggacgggatccaaccgtagaagagattgcagggaagcttggggtaagcagt

SEQ ID NO: 34818 - DNA, 260 bp, Unknown
  Description of Unknown: RightRegion for integrase B8819 sequence
gcgcgtgaactggcgctccggcaggccgcagaaaggaggcttgccaaatgccagcagtaacagcgacgcgggtaacgattatccctgcaaagaaagaccggcttcccatcaatgtactgagcagcgaggcccgcaagctgcgggtggcagcctatgctcgtgtatccaccaacaatgaggagcagcttaccagctatgaggcgcaggtggactattatacccggtacattcaatctaaggacgagtggcagtttgtagag

SEQ ID NO: 34819 - DNA, 260 bp, Unknown
  Description of Unknown: RightRegion for integrase B8820 sequence
tctgttataaaagaaattcaaattgacgatcgtagaaatttaaaggtcatttttttatgactttttttgtagtagtaactatgagcagcctgtgggttgctatcagttactactactaatttataacactattttattaaatcagatagcaataagatctttccatgttgccggtccgcatactccatctacttccaaggctccgtttcttgatttctggtatgctttaagtgcataaatagtattgtccccagcttctc

SEQ ID NO: 34820 - DNA, 260 bp, Unknown
  Description of Unknown: RightRegion for integrase B8821 sequence
tcagtcattaaagaaatccagattgacgatcacaagaatttaaaggtcatttttttatgacctttttgtagtagtaaccgatagtaacctgtcggctcgtcggccagcacaatagccggtttggtaatcaaggcgcgggcaatcgccacacgctgctgctgtccgccggaaagattgttcggcatatttttcagtttatctttcagccccagcaggtgaacgatctcgtccaaaaacttctgatccaccgtgtccccgtc

SEQ ID NO: 34821 - DNA, 260 bp, Unknown
  Description of Unknown: RightRegion for integrase B8822 sequence
atagagcgaatggatgttccagtggaagatagttatcatgtaaagatacatttttgttaggtacgtttaattcatcaacaacacctgtcgccggcagtccaaaaatagattggaaggtacgcaccgcttccgctgtcaaaggtccataaataccatccacagccacacgcggaatcgccggataatcccctgcaatcacattcagatgttcctgcagctggctcaccttttttccttctgaacccacagacagttctcct

SEQ ID NO: 34822 - DNA, 251 bp, Unknown
  Description of Unknown: RightRegion for integrase B8823 sequence
tcagtcattaaagaaatccagattgacgatcacaagaatttaaaggtcatttttttatgacctttttgtagtagtaactaatagtaacctgtgggcaggacagccagcttaaaatgccaaatccagcaccgataggcagtacctttgcttcgtacacaaagctgatccggcagaactcccgcatggcgttgataacagttttattcttcaaaccacctacgccataggcccggaaagtttgaataccagac

SEQ ID NO: 34823 - DNA, 109 bp, Unknown
  Description of Unknown: RightRegion for integrase B8824 sequence
tcagtcattaaagaaatccagattgacgatcacaagaatttaaaggtcatttttttatgacctttttgtagtagtaactaatagtaacctgttctttatttggatagat

SEQ ID NO: 34824 - DNA, 260 bp, Unknown
  Description of Unknown: RightRegion for integrase B8825 sequence
cggttgcagaataggaggataaacgatgccgacagtaaaggtaataccagcgactcgtgattttcatacgggcatagaaaagacaacaacgcgaaagaagagggttggcgcgtatgccagggtttctactgatagcgatgatcagctttcgtcttatgaggcacagtgcgattattatacgaggtatatcaagagtcgtcccgattgggagtttgttggattgtatgccgacgaggggatttcgggtacaaacaccaagc

SEQ ID NO: 34825 - DNA, 134 bp, Unknown
  Description of Unknown: RightRegion for integrase B8826 sequence
tgtattgaaaagattattattacggatgatgatatagaaataagatttaatatcgaataattttctcctacggaatatcattccgatgattgtttataggagaaaacaccgaattggccacgtttttgcccgat

SEQ ID NO: 34826 - DNA, 260 bp, Unknown
  Description of Unknown: RightRegion for integrase B8827 sequence
tcagtcattaaagaaattcagattgacgatcacaaaaatttaaaggtcatttttttatgacctttttgtagtagtaactgatagtaacctgtgggttgctatcagttactactactaatttataacactattttattaaatcagatagcaataagatctttccatgttgccggtccgcatactccatctacttccaaggctccgtttcttgatttctggtatgctttaagagcataaatagtattgtccccagcttctct

SEQ ID NO: 34827 - DNA, 260 bp, Unknown
  Description of Unknown: RightRegion for integrase B8828 sequence
tgcgttgaaaagatagtcataactgatggcaatattgatattcattttaggattatttaagttttatttcttcttacgctgttcatcccgatgaacgcagtaaggggaaaacacaacatattgaccagaactctattcaaataacaatatattgtgaaaatattactatttgctgacggtttgaccgtctttttttatgcgaaaattcaaccataaggaggcggtcgaaatgttttcagatgctttattgacaaagatat

SEQ ID NO: 34828 - DNA, 141 bp, Unknown
  Description of Unknown: RightRegion for integrase B8829 sequence
tctgtcattaaagaaattcaaattgacgatcataagaatttaaagattatttttttatgacttttttatagtagtaactggtagtaacctgtcggctcatctgcaaatataatttccggacgattcaccagtgctcttgca

SEQ ID NO: 34829 - DNA, 91 bp, Unknown
  Description of Unknown: RightRegion for integrase B8830 sequence
tcagtcattaaagaaattcagattgacgatcacaaaaatttaaaggtcatttttttatgacctttttgtagtagcaactgatagtaacctg

SEQ ID NO: 34830 - DNA, 260 bp, Unknown
  Description of Unknown: RightRegion for integrase B8831 sequence
tcagtcattaaagaaattcagattgacgatcacaagaatttaaaggtcatttttttatgaccttttttgtagtagtaactgatagtaacctgttctttatttggatagatccttatttttactgcccggtttatctttctcaccctgactctctatatactgatggattgtttcaacaggtgctatatttcaaagatttcttttgttctctctgacatcttatcgtccagcatctttctgccatatttcataaccagaat

SEQ ID NO: 34831 - DNA, 260 bp, Unknown
  Description of Unknown: RightRegion for integrase B8832 sequence
tctgtcattaaagaaattcaaattgacgatcataagaatttaaagattatttttttatgacttttttatagtagtaactgatagtaacctgtgggttgctatcagttgctactactaatttataacactattttattaaatcagatagcaataagatctttccatgttgccggtccgcatactccatctacttccaaggctccgtttcttgatttctggtatgctttaagtgcataaatagtattgtccccagcttctct

SEQ ID NO: 34832 - DNA, 92 bp, Unknown
  Description of Unknown: RightRegion for integrase B8833 sequence
tctgtcattaaagaaattcaaattgacgatcataagaatttaaagattatttttttatgacttttttatagtagtaactggtagtaacctgt

SEQ ID NO: 34833 - DNA, 260 bp, Unknown
  Description of Unknown: RightRegion for integrase B8834 sequence
tcagtcattaaagaaattcagattgacgatcacaagaatttaaaggtcatttttttatgacctttttgtagtagtaactgatagtaacctgtgggttgctatcagttactactactaatttataacactattttattaaatcagatagcaataagatctttccatgttgccggtccgcatactccatctacttccaaggctccgtttcgtgatttctggtatgctttaagtgcataaatagtattgtccccagcttctct

SEQ ID NO: 34834 - DNA, 260 bp, Unknown
  Description of Unknown: RightRegion for integrase B8835 sequence
cggttgcagaataggaggataaacgatgccgacagtaaaggtaataccagcgactcgtgattttcatacgggcatagaaaagacaacaacgcgaaaaaagagggttggcgcgtatgccagggtttctactgatagcgatgatcagctttcgtcttatgaggcacaatgcgattattatacgaggtatatcaagagtcgtcccgattgggagttcgttggattgtatgccgacgaggggatttcgggtacaaacaccaagc

SEQ ID NO: 34835 - DNA, 144 bp, Unknown
  Description of Unknown: RightRegion for integrase B8836 sequence
tctgtcattaaagaaattcaaattgacgatcataagaatttaaagattatttttttatgacttttttatagtagtaactggtagtaacctgtcggctcatctgcaaatataatttccggacgattcaccagtgctcttgcaatt

SEQ ID NO: 34836 - DNA, 260 bp, Unknown
  Description of Unknown: RightRegion for integrase B8837 sequence
cggttgcagaataggaggataaacgatgccgacagtaaaggtaataccagcgactcgtgattttcatacgggcatagaaaagacaacaacgcgaaaaaagagggtgggcgcgtatgccagggtttctactgatagcgatgatcagctttcgtcttatgaggcacagtgcgattattatacgaggtatatcaagagtcgtcccgattgggagtttgttggattgtatgccgacgaggggatttcgggtacaaacaccaagc

SEQ ID NO: 34837 - DNA, 260 bp, Unknown
  Description of Unknown: RightRegion for integrase B8838 sequence
tctgtcattaaagaaattcaaattgacgatcataagaatttaaagattatttttttatgactttttttatagtagtaactgatagtaacctgtgggttgctatcagttactactactaatttataacactattttattaaatcagatagcaataagatctttccatgttgccggtccgcatactccatctacttccaaggctccgtttcttgatttctggtatgctttaagtgcataaatagtattgtccccagcttctc

SEQ ID NO: 34838 - DNA, 260 bp, Unknown
  Description of Unknown: RightRegion for integrase B8839 sequence
tctgtcattaaagaaattcaaattgacgatcataagaatttaaagattatttttttatgacttttttatagtagtaactggtagtaacctgtgggttgccatcagttactactactaatttataacactattttattaaatcagatagcaataagatctttccatgttgccggtccgcatactccatctacttccaaggctccatttcttgatttctggtatgctttaagagcataaatagtattgtccccagcttctct

SEQ ID NO: 34839 - DNA, 143 bp, Unknown
  Description of Unknown: RightRegion for integrase B8840 sequence
tcagtcattaaagaaatccagattgacgatcacaagaatttaaaggtcatttttttatgacctttttgtagtagtaactgatagtaacctgttctttatttggatagatccttatttttactgcccggtttatctttctcacc

SEQ ID NO: 34840 - DNA, 260 bp, Unknown
  Description of Unknown: RightRegion for integrase B8841 sequence
tgcattgataaaatcttaatctatagagataatatagaaattcatttcattacaaattaagtcttttctaccatatacatatcataggagcgattagtcgatggtagaaaattaaaaaatacgttgaccggatttgctcaaaataacgtaaaaacgtatcgtacagaatattgataataataactattattagtataaaatagcagtgactgataaatgacggaaccttgacggtttttcgtcttttttttatgtgaaaa

SEQ ID NO: 34841 - DNA, 260 bp, Unknown
  Description of Unknown: RightRegion for integrase B8842 sequence
tgtgtggaaaaagtagtcataactgatggtgacatcgacattcattttaatatttcttaattttttctccttacgaacttcattccgatgattgcagtaaggggaaaacacaacatattgaccggaactctattcgaataacaatatattgtggaaatattactatttgctgacggtttgaccgtctttttttatgcgaaaattcaaccataaggaggcggtcgaaatgttttcagatgctttattaacaaagatatttt

SEQ ID NO: 34842 - DNA, 241 bp, Unknown
  Description of Unknown: RightRegion for integrase B8843 sequence
tcagtcattaaagaaatccagattgacgatcacaagaatttaaaggtcatttttttatgacctttttgtagtagtaactgatagtaacctgtcggctcgtcggccagcacaatagccggtttggtaatcaaggcgcgtgcgatagccacacgctgctgctgtccgccggaaagattgttcggcatgtttttcagtttatcttccagccccagcagatgaacgatctcgtccaaaaacttct

SEQ ID NO: 34843 - DNA, 260 bp, Unknown
  Description of Unknown: RightRegion for integrase B8844 sequence
agagtcgtgaggagaatcgagatcaagcgtcactcggtcgacaaggtgtactttgtttaaatttttgtgcaattttttattacttattttttgctattatgtaaccttgtcacttgtcatggtaacataatagtaaaaaatatcaataaaaagcactgatttagtgcaaatatatactttacaaagtactgaatcggtgctatactatagtcataacaaagaaaggaactgccaaaggtagtaaagtaaagagaaatgaa

SEQ ID NO: 34844 - DNA, 143 bp, Unknown
  Description of Unknown: RightRegion for integrase B8845 sequence
tcagtcattaaagaaattcagattgacgatcacaaaaatttaaaggtcatttttttatgacctttttgtagtagtaactgatagtaacctgttctttatttggatagatccttatttttactgcccggtttatctttctcacc

SEQ ID NO: 34845 - DNA, 139 bp, Unknown
  Description of Unknown: RightRegion for integrase B8846 sequence
tgtgtggaaaaagtagtcataactgatggtgacatcgacattcattttaatatttcttaattttttctccttacgaacttcatcccgatgaacgcagtaaggggaaaacacaacatattgaccagaactctattcaaat

SEQ ID NO: 34846 - DNA, 141 bp, Unknown
  Description of Unknown: RightRegion for integrase B8847 sequence
tctgtcattaaagaaattcaaattgacgatcataagaatttaaagattatttttttatgacttttttatagtagtaactgatagtaacctgtcggctcatctgcaaatataatttccggacgattcaccagtgctcttgca

SEQ ID NO: 34847 - DNA, 260 bp, Unknown
  Description of Unknown: RightRegion for integrase B8848 sequence
tcagtcattaaagaaattcagattgacgatcacaaaaatttaaaggtcatttttttatgacctttttgtagtagtaactgatagtaacctgtagtaagccatgctacaccaacatatgccgcttcatcttctgatccatatacgatttcatttttttccttgtttacggtatgtccgaacatctgctcatctgcttcaatcggtattgttgatgtatttaagataacatctgcgtatcgaaattccttgtcatactctgc

SEQ ID NO: 34848 - DNA, 260 bp, Unknown
  Description of Unknown: RightRegion for integrase B8849 sequence
tcagtcattaaagaaatccagattgacgatcacaagaatttaaaggtcatttttttatgacctttttgtagtagtaactgatagtaacctgttctttatttggatagatccttatttttactgcccggtttatctttctcaccctgactctctatatactgatggattgtttcaacaggtgctatatttcaaagatttcttttgttctctctgacatcttatcgtccagcatctttctgctatatttcataaccagaatc

SEQ ID NO: 34849 - DNA, 260 bp, Unknown
  Description of Unknown: RightRegion for integrase B8850 sequence
tcagtcattaaagaaatccagattgacgatcacaagaatttaaaggtcatttttttatgacctttttgtagtagtaactgatagtaacctgttctttatttggatagatccttatttttactgcccggtttatctttctcaccctgactctctatatactgatggattgtttcaacaggtgctatatttcaaagatttcttttgttctctctgacatcttatcgtccagcatctttctgccatatttcataaccagaatc

SEQ ID NO: 34850 - DNA, 142 bp, Unknown
  Description of Unknown: RightRegion for integrase B8851 sequence
tcagtcattaaagaaattcagattgacgatcacaaaaatttaaaggtcatttttttatgacctttttgtagtagtaactgatagtaacctgttctttatttggatagatccttatttttactgcccggtttatctttctcac

SEQ ID NO: 34851 - DNA, 260 bp, Unknown
  Description of Unknown: RightRegion for integrase B8852 sequence
tcagtcattaaagaaatccagattgacgatcacaagaatttaaaggtcatttttttatgacctttttgtagtagtaactaatagtaacctgttctttatttggatagattcttatttttactgcccggtttatctttctcaccctgactctctatatactgatggattgtttcaacaggtgctatatttcaaagatttcttttgttctctctgacatcttatcgtccagcatctttctgctatatttcataaccagaatc

SEQ ID NO: 34852 - DNA, 260 bp, Unknown
  Description of Unknown: RightRegion for integrase B8853 sequence
tgcattgataaaatcttaatctatagagataatatagaaattcatttcattacaaattaagtcttttctaccatatacatatcataggagcgattagtcgatggtagaaaattaaaaaatacgttgaccggatttgctcaaaataacgtaaaaacgtatcgtacagaatattgataataataactattatcagtataaaatagcagtgactgataaatgacggaaccttgacggtttttcgtcttttttttatgtgaaaa

SEQ ID NO: 34853 - DNA, 260 bp, Unknown
  Description of Unknown: RightRegion for integrase B8854 sequence
cgcacgattaagcgacttgaggcggataataacggcgcgtttttcgtaacgcctgtttagttatattttaccttggcgttccctacattaaaatataactaaccccccggcatttgccgaggggttaagtttagctttccaatttccgcatgacgctattataaacccgctcgtttaccactttcaagctgtccatcagctcgtccatgacctcccacgcacgggttgggtcaacgttagataccgcccgaaggaaatcg

SEQ ID NO: 34854 - DNA, 260 bp, Unknown; identical to SEQ ID NO: 34848
  Description of Unknown: RightRegion for integrase B8855 sequence

SEQ ID NO: 34855 - DNA, 143 bp, Unknown; identical to SEQ ID NO: 34839
  Description of Unknown: RightRegion for integrase B8856 sequence

SEQ ID NO: 34856 - DNA, 260 bp, Unknown
  Description of Unknown: RightRegion for integrase B8857 sequence
tcagtcattaaagaaatccagattgacgatcacaagaatttaaaggtcatttttttatgacctttttgtagtagtaactgatagtaacctgttggttattcatagttactactacaaatattttataatattcctctttacataccactcattgagtggtattataatatcagaaacaaataagaacataaagtcaaggaggaaatagaaatgaagaaatacaatttatcaaaaatcatgaaaagagcatgggaactggt

SEQ ID NO: 34857 - DNA, 260 bp, Unknown; identical to SEQ ID NO: 34849
  Description of Unknown: RightRegion for integrase B8858 sequence

SEQ ID NO: 34858 - DNA, 260 bp, Unknown
  Description of Unknown: RightRegion for integrase B8859 sequence
tctgtcattaaagaaattcaaattgacgatcataagaatttaaagattatttttttatgacttttttatagtagtaactggtagtaacctgttggttattcacagttactactaaatacagctcctgattatttcaggagctttttgtttatcaaattgcaatcagatctttccatgttgctggtccgcatactccatcaacttcaagggctccatttctgtctttctggtatgctttaagtgcatagatcgtattgtcc

SEQ ID NO: 34859 - DNA, 260 bp, Unknown
  Description of Unknown: RightRegion for integrase B8860 sequence
tgcgttgaaaagatagtcataactgatgacaatattgatattcattttaggattatttaagttttatttcttcttacgctgttcatccctatgattattggggaaatccggagatacctgcgggacaacagtacgatccgggtcagccggtcactgcgggacacggcttacaaagcgatctatgcccgggaaaattatctgaaaaacaatctccgagaaccgacgattatggagattgcatcggaaatcgggatggaaaa

SEQ ID NO: 34860 - DNA, 260 bp, Unknown
  Description of Unknown: RightRegion for integrase B8861 sequence
tgtgtggaaaaagtagtcataactgatggtgacatcgacattcattttaatatttcttaattttttctccttacgaacttcatcccgatgaacgcggtaaggagaaaacacaacatattgaccagaactctattcaaataacaatatattgtgaaaatattactatttgctgacggtttgaccgtctttttttatgcgaaaattcaaccataaggaggcggtcgaaatgttttcagatgctttattaacaaagatatttt

SEQ ID NO: 34861 - DNA, 260 bp, Unknown
  Description of Unknown: RightRegion for integrase B8862 sequence
tcagtcattaaagaaatccagattgacgatcacaagaatttaaaggtcatttttttatgacctttttgtagtagtaactgatagtaacctgttggctcgtctgccagaatcagagaaggacgggtaatcaatgcgcggccaatcgccactctctgctgttgaccgccggaaagctgactgggtaaatgattacgacgatctttcaaattcaaaaccgtcagcagttcctccaaatatctcttatccggcttttgataatc

SEQ ID NO: 34862 - DNA, 260 bp, Unknown
  Description of Unknown: RightRegion for integrase B8863 sequence
tcagtcattaaagaaatccagattgacgatcacaagaatttaaaggtcatttttttatgacctttttgtagtagtaactgatagtaacctgttctttatttggatagatccttatttttacggcgcggttcattcttctcaccctggctttctatatactgccgtatcgtttcaatcgttgctccacctgcactgagcaggccgaagatctgaccccagaatgcatctttcatggtctaactccattatatttatcgtcc

SEQ ID NO: 34863 - DNA, 164 bp, Unknown
  Description of Unknown: RightRegion for integrase B8864 sequence
tcagtcattaaagaaattcagattgacgatcacaagaatttaaaggtcatttttttatgacctttttgtagtagtaactgatagtaacctgttctttatttggatagatccttatttttactgcccggtttatctttctcaccctgactctctatatactgatg

SEQ ID NO: 34864 - DNA, 260 bp, Unknown
  Description of Unknown: RightRegion for integrase B8865 sequence
tcagttattaaagaaatccagattgacgatcacaagaatttaaaggtcatttttttatgacctttttgtagtagtaactgatagtaacctgttctttatttggatagatccttatttttactgcccggtttatctttctcaccctgactctctatatactgatggattgtttcaacaggtgctatatttcaaagatttcttttgttctctctgacatcttatcgtccagcatctttctgctatatttcataaccagaatc

SEQ ID NO: 34865 - DNA, 260 bp, Unknown
  Description of Unknown: RightRegion for integrase B8866 sequence
tcagtcattaaagaaatccagattgacgattacaagaatttaaaggtcatttttttatgacctttttgtagtagtaactgatagtaacctgttctttatttggatagatccttatttttactgcccggtttatctttctcaccctgactctctatatactgatggattgtttcaacaggtgctatatttcaaagatttcttttgttctctctgacatcttatcgtccagcatctttctgctatatttcataaccagaatc

SEQ ID NO: 34866 - DNA, 260 bp, Unknown
  Description of Unknown: RightRegion for integrase B8867 sequence
tgcgttgaaaagatagtcataactgatggaaatattgatattcattttaggattatttaagttttatttcttcttacgctgttcatcccgatgaacgcagtaaggggaaaacacaacatattgaccagaactctattcaaataacaatatattgtgaaaatattactatttgctgacggtttgaccgtctttttttatgcgaaaattcaaccataaggaggcggtcgaaatgttttcagatgctttattgacaaagatat

SEQ ID NO: 34867 - DNA, 260 bp, Unknown
  Description of Unknown: RightRegion for integrase B8868 sequence
tcagtcattaaagaaattcagattgacgatcacaaaaatttaaaggtcatttttttatgacctttttgtagtagtaactgatagtaacctgttctttatttggataaatccttatttttactgcccggtttatctttctcaccctgactttctatatactgatggattgttccaacaggtgctatatttcaaagatttcttttgctctctctaacattttatcgtccagcatctttctgctatatttcataaccatgatc

SEQ ID NO: 34868 - DNA, 260 bp, Unknown
  Description of Unknown: RightRegion for integrase B8869 sequence
atagaacgaattgatgttccagtgaaagatagttatcacatcaagatacatttctgttaggttcgattaacacatcaacaacacctgtcgccggcagtccaaaaatagattggaaggtacgcaccgcttccgctgtcaaaggtccataaataccatccacagccacacgcggaatcgccggataatcccctgcaatcacattcagatgttcctgtaactggctcaccttttttccttctgaacccacggacagttctcct

SEQ ID NO: 34869 - DNA, 260 bp, Unknown
  Description of Unknown: RightRegion for integrase B8870 sequence
tctgtcattaaagaaattcaaattgacgatcataagaatttaaagattatttttttatgacttttttatagtagtaactgatagtaacctgtgggttgctatcagttactactactaatttataacactattttattaaatcagatagcaataagatctttccatgttgccggtccgcatactccatctacttccaaggctccgtttcttgatttctggtatgctttaagtgcataaatagtattgtccccagcttctct

SEQ ID NO: 34870 - DNA, 142 bp, Unknown
  Description of Unknown: RightRegion for integrase B8871 sequence
tctgtcattaaagaaattcaaattgacgatcataagaatttaaagattatttttttatgacttttttatagtagtaactggtagtaacctgtcggctcatctgcaaatataatttccggacgattcaccagtgctcttgcaa

SEQ ID NO: 34871 - DNA, 260 bp, Unknown
  Description of Unknown: RightRegion for integrase B8872 sequence
tcagtcattaaagaaatccagattgacgatcacaagaatttaaaggtcatttttttatgacctttttgtagtagtaactgatagtaacctgtgggttgctatcagttactactactaatttataacactattttattaaatcagatagcaataagatctttccatgttgccggtccgcatactccatctacttccaaggctccgtttcttgatttctggtatgctttaagagcataaatagtattgttcccagcttctct

SEQ ID NO: 34872 - DNA, 260 bp, Unknown
  Description of Unknown: RightRegion for integrase B8873 sequence
tcagtcattaaagaaatccagattgacgatcacaagaatttaaaggtcatttttttatgacctttttgtagtagtaactgatagtaacctgttctttatttggatagatccttatttttactgcccgatttatctttctcaccctgactctctatatactgatggattgtttcaacaggtgctatatttcaaagatttcttttgttctctctgacatcttatcgtccagcatctttctgctacatttcataaccatgatc

SEQ ID NO: 34873 - DNA, 109 bp, Unknown
  Description of Unknown: RightRegion for integrase B8874 sequence
atagagcgaatggatgttccagtggaagatagttatcatgtaaagatacatttttgttaggtacgtttaattcatcaacaacacctgtcgccggcagtccaaaaataga

SEQ ID NO: 34874 - DNA, 260 bp, Unknown
  Description of Unknown: RightRegion for integrase B8875 sequence
tcagtcattaaagaaatccagattgacgatcacaagaatttaaaggtcatttttttatgacctttttgtagtagtaactgatagtaacctgtcggttcatcagcaaggataatcgcaggcttcgtaattaaagctcgtgcaatcgctacacgttgctgttgaccgcctgaaagattgttcggcatattttccagtttatcttctaaagccaacatatacacaacttcgtccataaatttctggtctactgtatcgccatc

SEQ ID NO: 34875 - DNA, 260 bp, Unknown
  Description of Unknown: RightRegion for integrase B8876 sequence
tcagtcattaaagaaatccagattgacgatcacaagaatttaaaggtcatttttttatgacctttttgtagtagtaactgatagtaacctgtgggttgctatcagttactactactaatttataacgctattttattaaatcagatagcaataagatctttccatgttgccggtccgcatactccatctacttccaaggctccgtttcttgatttctggtatgctttaagtgcataaatagtattgtccccagcttctct

SEQ ID NO: 34876 - DNA, 260 bp, Unknown
  Description of Unknown: RightRegion for integrase B8877 sequence
tcagtcattaaagaaatccagattgacgatcacaagaatttaaaggtcatttttttatgacctttttgtagtagtaactaatagtaacctgttggttattcacagttactactactaaatacagctcctgattatttcaggagctttttgtttatcaaattgcaatcaggtctttccatgttgctggtccgcatactccatcaacttcaagggctccatttctgtctttctggtatgctttaagtgcatagatcgtattg

SEQ ID NO: 34877 - DNA, 260 bp, Unknown; identical to SEQ ID NO: 34848
  Description of Unknown: RightRegion for integrase B8878 sequence

SEQ ID NO: 34878 - DNA, 260 bp, Unknown
  Description of Unknown: RightRegion for integrase B8879 sequence
cgcacgattaagcgacttgaggcggataataacggcgcgtttttcgtaacgcctgtttagttatattttaccttggcgttccatacgttaaaatataactaaccccccggcatttgccgaggggttaagtttagctttccaatttccgcatgacgctattataaacccgctcgtttaccactttcaagctgtccatcagctcgtccatgacctcccacgcacgggttgggtcaacgttagataccgcccggaggaaatcg

SEQ ID NO: 34879 - DNA, 131 bp, Unknown
  Description of Unknown: RightRegion for integrase B8880 sequence
tctgtcattaaagaaattcaaattgacgatcataagaatttaaagattatttttttatgacttttttatagtagtaactgatagtaacctgtcggctcatctgcaaatataatttccggacgattcaccag

SEQ ID NO: 34880 - DNA, 260 bp, Unknown
  Description of Unknown: RightRegion for integrase B8881 sequence
attatcaaagaaatcaaaatttaccctgataggcacatagaatattccttaaatgtttgaaaaatttttaatgaattttattacttaatatttctccctctgtagttgcagtaatattatgtaatataatccccgccctcatgagagagcggggactatcatcagtgcttcacgacaaactcatagtaccgagcaagcttgtcgggagcggcgtcctgatcatccagaaacgctttcgcaatttcggcatagaagtcgat

SEQ ID NO: 34881 - DNA, 260 bp, Unknown
  Description of Unknown: RightRegion for integrase B8882 sequence
cgcacaatccagcgcatcgacgcagacaatgacggtgcgttttttgtaacgccaagttagtcttattttcatgtcgcaacgctaacgttaaaatataactaaccccccgacatttgccgaggggttaagtttagctttccaatttccgcatgacgctattgtaaacccgctcgtttatcacctgcaagctgtccatcagctcgtccatgacctcccacgcacgggctgggtcaacgttagacaccgcccgaaggaaatcg

SEQ ID NO: 34882 - DNA, 260 bp, Unknown
  Description of Unknown: RightRegion for integrase B8883 sequence
ataaaagaaatttatttgaatgaagcctttgaaattactggctttatattttatatctaggacttgtactaaataactatttcctagaggttaacatcaattagtacaagtctattaaaaagggcgattagaaattctaaccgccatttattttacgcttttacaatcgcagcgtcaaatcctgctgctttcaatttttcctgcaaggaaatagcatttgctttgttgcgatacgctccgacctgtacacgataaataga

SEQ ID NO: 34883 - DNA, 260 bp, Unknown
  Description of Unknown: RightRegion for integrase B8884 sequence
cgcacgatccagcgcatcgacgcagacaatgacggtgcgttttttgtaacgccaagttagtcttattttcatgtcgcaacactaactgtatatccgaaatatttttgcaaggtctccagatcgccccggtcccaggctacctcgatggcgtggcggatggcccgttccacccgggaaggcgttgtggcaaaccgcttggccacttcgggatagagaaccttcgtcaccgcgttgatgacatccatatcccgcaccgtgat

SEQ ID NO: 34884 - DNA, 260 bp, Unknown
  Description of Unknown: RightRegion for integrase B8885 sequence
ataaaagaaatttatttgaatgaagcctttgaaattactggctttatattttatatctaggacttgtactaaataactatttcctagaggttaacatcaattagtacaagtctattaaaaagggcgattagaaattctaaccgccctttattttacgcttttacaatcgcagcgtcaaatcctgccgatttcaatttttcctgcaaggcaatagcatttgctttattgcgatacgctccgacctgtacacgataaataga

SEQ ID NO: 34885 - DNA, 260 bp, Unknown; identical to SEQ ID NO: 34884
  Description of Unknown: RightRegion for integrase B8886 sequence

SEQ ID NO: 34886 - DNA, 260 bp, Unknown
  Description of Unknown: RightRegion for integrase B8887 sequence
cgcacaatccagcgcatcgacgcagacaatgacggtgcgttttttgtaacgccaagttagtcttattttcatgttgcaacactaacattaaaatataactaacccctcggcatttgtcgaggggttaagtttagctttccaatttccgcatgacgctattgtaaacccgcgcatttaccactttcaagctgtccatcaactcgtccatgacctcccacgcacgggctgggtcaacgttagacaccgcccggaggaattcg

SEQ ID NO: 34887 - DNA, 260 bp, Unknown
  Description of Unknown: RightRegion for integrase B8888 sequence
ataaaagaaatttatttgaatgaagcctttgaaattactggctttatattttatatctagggcttgtactaaataactatttcctagaggttaacattaattagtacaagtctattaaaaatggcgattagaaattctaaccgccatttattttacgcttttacaatcgcagcatcaaatcctgctgctttcaatttttcctgcaaggcaatagcatttgctttgttgcgatacgctccgacctgtacacgataaataga

SEQ ID NO: 34888 - DNA, 260 bp, Unknown
  Description of Unknown: RightRegion for integrase B8889 sequence
attgtcaaagaaatcaaaatataccctgataggcacatagaatattccttaaatgtgtgaaaaaaatttccaaaagtttattacttaatattacttcctctgtggatgagcttaaatagatgataggcatgatgctcctcccttcctgcctcattctatggtatcctccgtgaaaatgtgatatactcagcctgtcagaatcgatcacgtgccattttcccacagggcatttcttacatgttctaaatctctgcccttcc

SEQ ID NO: 34889 - DNA, 260 bp, Unknown
  Description of Unknown: RightRegion for integrase B8890 sequence
cgcacaatccagcgcatcgacgcagacaatgacggtgcgttttttgtaacgcccagttagtcttattttcatgtcgcaacgctaacgttaaaatataactaaccccccggcatttgccgaggggttaagtttagctttccaatttccgcatgacgctattataaacccgctcgttgaccactttcaagctgtccatcagctcgtccatgacctcccacgcacgggctgggtcaacgttagacaccgcccgaaggaaatcg

SEQ ID NO: 34890 - DNA, 260 bp, Unknown
  Description of Unknown: RightRegion for integrase B8891 sequence
cgcacgatccagcgcatcgacgcagacaatgacggtgcgttttttgtaacgcctagttagtcttattttcatgtcacaacgcctacgtcaaaatataactaaccccccggcatttgccgagggggttaagtttagctttccaatttccgcatgacgctattataaacccgctcgttgaccactttcaagctgtccatcagctcgtccatgacctcccacgcacgggctgggtcaacgttagacaccgcccggaggaaatc

SEQ ID NO: 34891 - DNA, 260 bp, Unknown
  Description of Unknown: RightRegion for integrase B8892 sequence
cgcacaatccagcgcatcgacgcagacaatgacggtgcgttttttgtaacgccaagttagtcttattttcatgtcgcaacacctacattaaaatataactaaccccccggcatttgccgagggggttaagtttagttttccaatttccgcatgacgctattataaacccgctcgttgaccactttcaagctgtccatcagctcgtccatgacctcccacgcacgggctgggtcaacgttagacaccgcccggaggaaatc

SEQ ID NO: 34892 - DNA, 260 bp, Unknown
  Description of Unknown: RightRegion for integrase B8893 sequence
cgcacaatccagcgcatcgacgcagacaatgacggtgcgttttttgtaacgccaagttagttttattttcacgtcgcaacactaacattaaaatataactaaccccccggcatttgccgaggggttaaatttagctttccaatttccgcatgacgctattgtaaacccgctcgttgaccactttcaagctgtccatcagctcgtccataacctcccacgcacgggctgggtcaacgttagacaccgcccggaggaaatcg

SEQ ID NO: 34893 - DNA, 260 bp, Unknown
  Description of Unknown: RightRegion for integrase B8894 sequence
cgcacaatccagcgcatcgacgcagacaatgacggtgcgttttttgtaacgccaagttagtcttattttcacgtcgcaacgctaacgttaaaatataactaaccccccggcatttgccgaggggttaagtttagctttccaatttccgcatgacgctattgtaaacccgctcgtttatcacctgcaagctgtccatcagctcgtccatgacctcccacgcacgggctgggtcaacgttggacaccgcccgaaggaaatcg

SEQ ID NO: 34894 - DNA, 260 bp, Unknown
  Description of Unknown: RightRegion for integrase B8895 sequence
ataaaagaaatttatttgaatgaagcctttgaaattactggctttatattttatatctaggacttgtactaaataactatttcctagaggttaacatcaattagtacaagtctattaaaaagggcgattagaaattctaaccgccctttattttacgcttttacaatcgcagcatcaaatcctgctgctttcaatttttcctgcaaggcaatagcatttgctttgttgcgatacgctccgacctgtacacgataaataga

SEQ ID NO: 34895 - DNA, 260 bp, Unknown
  Description of Unknown: RightRegion for integrase B8896 sequence
ataaaagaaatttatttgaatgaagcctttgaaattactggctttatattttatatctaggacttgtactaaataactatttcctagcggttaacattaattagtacaagtctattaaaaatggcgattagaaattctaaccgccatttattttacgcttttacaatcgcagcgtcaaatcctgctgctttcaatttttcctgcaaggaaatagcatttgctttgttgcgatacgctccgacctgtacacgataaataga

SEQ ID NO: 34896 - DNA, 260 bp, Unknown
  Description of Unknown: RightRegion for integrase B8897 sequence
ataaaagaaatttatttgaatgaagcctttgaaattactggctttatattttatatctaggacttgtactaaataactatttcctaaaggttaacatcaattagtacaagtctattaaaaagggcgattagaaattctaaccgccctttattttacgcttttacaatcgcagcgtcaaatcctgccgatttcaatttttcctgcaaggcaatagcatttgctttattgcgatacgctccgacctgtacacgataaataga

SEQ ID NO: 34897 - DNA, 260 bp, Unknown
  Description of Unknown: RightRegion for integrase B8898 sequence
ataaaagaaatttatttgaatgaagcctttgaaattactggctttatattttatatctaggacttgtactaaacagctatttcctagcggttaacattaattagtacaagtctattaaaaagggcgattagaaattctaaccgccctttgttttacgcttttacaatcgcagcatcaaatcctgctgctttcaatttttcctgcaaggcaatagcatttgctttgttgcgatacgctccgacctgtacacgataaataga

SEQ ID NO: 34898 - DNA, 260 bp, Unknown
  Description of Unknown: RightRegion for integrase B8899 sequence
cgcacaatccagcgcatcgacgcagacaatgacggtgcgttttttgtaacgccaagttagtcttattttcatgtcgcaacactaacattaaaatataactaaccccccggcatttgccgaggggttaaatttagttttccaatttccgcatgacgctattataaacccgctcgttgaccactttcaagctgtccatcagctcgtccatgacctcccacgcacgggctgggtcaacgttagacaccgcccggaggaaatcg

SEQ ID NO: 34899 - DNA, 260 bp, Unknown
  Description of Unknown: RightRegion for integrase B8900 sequence
ataaaagaaatttatttgaatgaagcctttgaaattactggctttatattttatatctaggacttgtactaaacatctatttcctagtggttaacattaattagtacaagtctattaaatcgaactataatgaatgcattattatcaaacctaggttttactgtaaccattgattttactgtgttttgagcattttttatttgcttataaaatggcaaatttgccatagaagtatataaaaatgcaacacgaaattgaac

SEQ ID NO: 34900 - DNA, 260 bp, Unknown
  Description of Unknown: RightRegion for integrase B8901 sequence
ataaaagaaatttatttgaatgaagcctttgaaattactggctttatattttatatctaggacttgtactaaataactatttcctagcggttaacattaattagtacaagtctattaaatcgaactataatgaatgcattcttatcaaacctaggttttactgtaaccattgattttactttgttttgagcattttttatttgcttataaagtggcaaatttgccatataagtatataaaatgaaacacgaaattgaacg

SEQ ID NO: 34901 - DNA, 86 bp, Unknown
  Description of Unknown: RightRegion for integrase B8902 sequence
ataaaagaaatttatttgaatgaagcctttgaaattactggctttatattttatatctaggacttgtactaaataactatttccta

SEQ ID NO: 34902 - DNA, 260 bp, Unknown
  Description of Unknown: RightRegion for integrase B8903 sequence
ataaaagaaatttatttgaatgaagcctttgaaattactggctttatattttatatctaggacttgtactaagtaactatttcctagaggttaacatcaattagtacaagtctattaaaaagggcgattagaaattctaaccgccatttattttacgcttttacaatcgcagcgtcaaatcctgctgctttcaatttttcctgcaaggaaatagcatttgctttgttgcgatacgctccgacctgtacacgataaataga

SEQ ID NO: 34903 - DNA, 260 bp, Unknown
  Description of Unknown: RightRegion for integrase B8904 sequence
ataaaagaaatttatttgaatgaagcctttgaaattagtggctttatattttatatctaggacttgtactaaataactgtttcctagcggttaacattaattagtacaagtctattaaaaatggcgattagaaattctaaccgccatttattttacgcttttacaatcgcagagtcaaatcctgctgctttcaatttttcctgcaaggcaatagcatttgctttattgtgatacgctccgacctgtacacgataaataga

SEQ ID NO: 34904 - DNA, 139 bp, Unknown
  Description of Unknown: RightRegion for integrase B8905 sequence
ataaaagaaatttatttgaatgaagcctttgaaattactggctttatattttatatctaggacttgtactaaataactatttcctagcggttaacattaattagtacaagtctattaaaaatggcgattagaaattcta

SEQ ID NO: 34905 - DNA, 260 bp, Unknown
  Description of Unknown: RightRegion for integrase B8906 sequence
cgcacaatccagcgcatcgacgcagacaatgacggtgcgttttttgtaacgccaagttagtcttattttcatgtcacaacactaacattaaaatataactaaccccccggcatttgccgagggggttaagtttagctttccaattttcgcatgacgctattataaacccgctcgttgaccactttcaagctgtccatcagctcgtccatgaccttccacgcacgggctgggtcaacgttagataccgcccggaggaaatc

SEQ ID NO: 34906 - DNA, 260 bp, Unknown
  Description of Unknown: RightRegion for integrase B8907 sequence
ataaaagaaatttatttgaatgaagcctttgaaattactggctttatattttatatctaagacttgtactaaataactatttcctagaggttaacattaattagtacaagtctattataaagggcgattagaaattctaaccgccctttattttacgcttttacaatcgcagcgtcaaatcctgccgatttcaatttttcctgcaaggcaatagcatttgctttattgcgatacgctccgacctgtacacgataaataga

SEQ ID NO: 34907 - DNA, 260 bp, Unknown
  Description of Unknown: RightRegion for integrase B8908 sequence
cgcacaatccagcgcatcgacgcagacaatgacggtgcgttttttgtaacgccaagttagttttattttcacgtcgcaacactaacattaaaatataactaaccccccggcatttgccgaggggttaaatttagctttccaatttccgcatgacgctattgtaaacccgctcgttgaccactttcaagctgtccatcagctcgtccataacctcccacgcacgggctgggtcaacgttagacaccgcccggaggaattcg

SEQ ID NO: 34908 - DNA, 260 bp, Unknown
  Description of Unknown: RightRegion for integrase B8909 sequence
cgcacaatccagcgcatcgacgcagacaatgacggtgcgttttttgtaacgccaagttagtcttattttcatgtcgcaacactaacattaaaatataactaaccccccggcatttgccgaggggttaaatttagctttccaatttccgcatgacgctattataaacccgctcgttgaccactttcaagctgtccatcagctcgtccatgacctcccacgcacgggctgggtcaacgttagacaccgcccggaggaaatcg

SEQ ID NO: 34909 - DNA, 139 bp, Unknown
  Description of Unknown: RightRegion for integrase B8910 sequence
ataaaagaaatttatttgaatgaagcctttgaaattactggctttatattttatatctaggacttgtactaaataactatttcctagcgggaatctgaattgtttttctgcgctggcaaaatgacttgaagtcatggtc

SEQ ID NO: 34910 - DNA, 260 bp, Unknown
  Description of Unknown: RightRegion for integrase B8911 sequence
gaggccatcaaacagatcaccataacccacgataaaataaacatagattttaatttatagaaaggttcgacgtagtacattcatccctatgatcattggcgaactgcgaaggtacctacgcgataacactgcactcagagtaagccgctcaatacgagatactgcatataaggcgctgaaaaaacgcacagagctgatggacgagctttcacgcgagcctaaactcggtgaaatagcaaaggcgcttgatatgaaagaag

SEQ ID NO: 34911 - DNA, 87 bp, Unknown
  Description of Unknown: RightRegion for integrase B8912 sequence
ataaaagaaatttatttgaatgaagcctttgaaattactggctttatattttatatctaggacttgtactaagtaactatttcctag

SEQ ID NO: 34912 - DNA, 260 bp, Unknown
  Description of Unknown: RightRegion for integrase B8913 sequence
ataaaagaaatttatttgaatgaagcctttgaaattactggctttatattttatatctaggacttgtactaaataactatttcctagtggttaacattaattagtacaagtatattaaaaatggcgattagaaattctaaccgccatttattttacgcttttacaatcgcagagtcaaatcctgctgctttcaatttttcctgcaaggaaatagcatttgctttgttgcgatacgctccgacctgtacacgataaataga

SEQ ID NO: 34913 - DNA, 260 bp, Unknown
  Description of Unknown: RightRegion for integrase B8914 sequence
ataaaagaaatttatttgaatgaagcctttgaaattactggctttatattttatatctaggacttgtactaagtaactattttctagaggttaacatcaattagtacaagtctattaaaaagggcgattagaaattctaaccgccctttattttacgcttttacaatcgcagcgtcaaatcctgccgatttcaatttttcctgcaaggaaatagcatttgctttgttgcgatacgctccgacctgtacacgataaataga

SEQ ID NO: 34914 - DNA, 260 bp, Unknown
  Description of Unknown: RightRegion for integrase B8915 sequence
cgcacaatccagcgcatcgacgcagacaatgacggtgcgttttttgtaacgccaagttagttttattttcatgtagcaacactaactgtatatccgaaatatttttgcaaggtctccagatcgccccggtcccaggctacctcgatggcgtggcggatggcccgctccacccgggaaggcgttgtggcgaaccgcttggccacttcgggatagaggaccttcgtcaccgcgttgatgacatccatatcccgcaccgtgat

SEQ ID NO: 34915 - DNA, 260 bp, Unknown
  Description of Unknown: RightRegion for integrase B8916 sequence
ataaaagaaatttatttgaatgaagcctttgaaattactggctttatattttatatctaggacttgtactaaataactatttcctagcggttaacattaattagtacaagtctattaaatcgaactataatgaatgcattattatcaaacctaggttttactgtaaccattgattttactgtgttttgagcattttttatttgcttataaaatggcaaatttgccattttataagcaaataaaaatgcaacacgaaattg

SEQ ID NO: 34916 - DNA, 260 bp, Unknown
  Description of Unknown: RightRegion for integrase B8917 sequence
ataaaagaaatttatttgaatgaagcctttgaaattactggctttatattttatatctaggacttgtactaaataactatttcctagtgggaaacattaattagtacaagtctattaaaaatggcgattagaaattctaaccgccatttattttacgcttttacaatcgcagcgtcaaatcctgccgatttcaatttttcctgcaaggcaatagcatttgctttattgcgatacgctccgacctgtacacgataaataga

SEQ ID NO: 34917 - DNA, 260 bp, Unknown
  Description of Unknown: RightRegion for integrase B8918 sequence
cgcacaatccagcgcatcgacgcagacaatgacggtgcgttttttgtaacgccaagttagttttattttcacgtcgcaacactaactgtatatccgaaatatttttgcaaggtctccaaatcgccccggtcccaggctacctcgatggcgtggcggatggcccgttccacccgggaaggcgttgtggcaaaccgcttggctacttcgggatagagaaccttcgtcaccgcgttgatgacatccatatcccgcaccgtgat

SEQ ID NO: 34918 - DNA, 260 bp, Unknown
  Description of Unknown: RightRegion for integrase B8919 sequence
ataaaagaaatttatttgaatgaagcctttgaaattactggctttatattttatatctaggacttgtactaagtaactatttcctagcgggaatctgaattgtttttctgcgctggcaaaatgacttgaggtcatggtcacgacgtgatccgcatagccggccgctacacacattgcaccgagagacagcgattccccacaggtactgcaggctccgtaaagtccaaagagcggtacctgaaaatccagcaccccaaacg

SEQ ID NO: 34919 - DNA, 260 bp, Unknown
  Description of Unknown: RightRegion for integrase B8920 sequence
ataaaagaaatttatttgaatgaagcctttgaaattactggctttatattttatatctaggacttgtactaaataactatttcctagcgggaatctgaattgtttttctgcgctggcaaaatgacttgaggtcatggtcacgacgtgatccgcatagccggccgctacacacattgcaccgagagacagcgattccccacaggtactgcaggctccgtaaagtccaaagagcggtacctgaaaatccagcaccccaaacg

SEQ ID NO: 34920 - DNA, 260 bp, Unknown
  Description of Unknown: RightRegion for integrase B8921 sequence
tcttttattgattacattgttgtaaatgactatgataatatcgatatttttttgcaataattatgttgcataatcagactatctcattgatgtatgcttctccatagtcaatgaaacagatatccccaacacgtatggacaatcccatttctatacagttattaaaatgtctacgtattcttaaattctgatcactgatcattcgtggaatagcttccttcacgggcaaagtctgataatcggcacttttctcttccaca

SEQ ID NO: 34921 - DNA, 260 bp, Unknown
  Description of Unknown: RightRegion for integrase B8922 sequence
cgcacaatccagcgcatcgacgcagacaatgacggtgcgttttttgtaacgccaagttagttttattttcatgtcgcaacactaacattaaaatataactaaccccccggcatttgccgaggggttaaatttagctttccaattttcgcatgacgctattgtaaacccgctcgtttatcacctgcaagctgtccatcagctcgtccatcacttcccacgcacgagccggatcaacgttggataccgcgcggagaaaatcg

SEQ ID NO: 34922 - DNA, 260 bp, Unknown
  Description of Unknown: RightRegion for integrase B8923 sequence
cgcacaatccagcgcatcgacgcagacaatgacggtgcgttttttgtaacgccaagttagtcttattttcatgtcgcaacactaacattaaaatataactaaccccccagcatttgccgaggggttaaatttagctttccaatttccgcatgacgctattgtaaacccgctcgttgaccactttcaagctgtccatcagctcgtccatgacctcccacgcacgggctgggtcaacgttagataccgcccggagaaattcg

SEQ ID NO: 34923 - DNA, 260 bp, Unknown
  Description of Unknown: RightRegion for integrase B8924 sequence
cgcacaatccagcgcatcgacgcagacaatgacggtgcgttttttgtaacgccaagttagtcttattttcatgtcgcaacacctacgttaaaatataactaaccccccggcatttgccgaggggttaagtttagctttccaatttccgcatgacgctattataaacccgctcgttgaccactttcaagctgtccatcagctcgtccatgacctcccacgcacgggctgggtcaacgttagacaccgcccggaggaattcg

SEQ ID NO: 34924 - DNA, 260 bp, Unknown
  Description of Unknown: RightRegion for integrase B8925 sequence
cgcacgatccagcgcatcgacgcagacaatgacggtgcgttttttgtaacgcctagttagtcttattttcacgtcacaacgcctacatcaaaatataactaaccccccggcatttgccgaggggtttaagtttagctttccaatttccgcatgacgctattataaacccgctcgttgaccactttcaagctgtccatcagctcgtccatgacctcccacgcacgggctgggtcaacgttagacaccgctcggaggaaatc

SEQ ID NO: 34925 - DNA, 260 bp, Unknown
  Description of Unknown: RightRegion for integrase B8926 sequence
cgcacaatccagcgcatcgacgcagacaatgacggtgcgttttttgtaacgccaagttagtcttattttcatgtcgcaacgctaacgttaaaatataactaaccccccggcatttgccgaggggttaagtttagctttccaatttccgcatgacgctattataaacccgctcgttgaccactttcaagctgtccatcagctcgtccatgacctcccacgcacgggctgggtcaacgttagacaccgcccggaggaaatcg

SEQ ID NO: 34926 - DNA, 183 bp, Unknown
  Description of Unknown: RightRegion for integrase B8927 sequence
cgcacaatccagcgcatcgacgcagacaatgacggtgcgttttttgtaacgccaagttagtcttattttcatgtcgcaacactaactgtatatccgaaatatttttgcaaggtctccagatcgccccgatcccaggctacctcgatggcgtggcggatggcccgttccacccgggaaggcgtt

SEQ ID NO: 34927 - DNA, 260 bp, Unknown
  Description of Unknown: RightRegion for integrase B8928 sequence
ataaaagaaatttatttgaatgaagcctttgaaattactggctttatattttatatctaggacttgtactaaataactatttcctaaaggttaacatcaattagtacaagtctattaaaaagggcgattagaaattctaaccgccatttattttacgcttttacaatcgcagcgtcaaatcctgctgctttcaatttttcctgcaaggaaatagcatttgctttgttgcgatacgctccgacctgtacacgataaataga

SEQ ID NO: 34928 - DNA, 260 bp, Unknown
  Description of Unknown: RightRegion for integrase B8929 sequence
ataaaagaaatttatttgaatgaagcctttgaaattactggctttatattttatatctaggacttgtactaaataactatttcctagaggttaacattaattagtacaagtatattaaaaaaggcgattagaaattctaaccgccctttattttacgctttcacaatggcaacttcaaatcctgctgctttcaatttatttttcatatacagttacatatttttctgatgctgtaatgtataatccagatttgagcctat

SEQ ID NO: 34929 - DNA, 260 bp, Unknown
  Description of Unknown: RightRegion for integrase B8930 sequence
ataaaagaaatttatttgaatgaagcctttgaaattactggctttatattttatatctaggacttgtactaaataactatttcctagtggttaatattaattagtacaagtatattaaaaagggcgattagaaattctaaccgccctttattttacgcttttacaatcgcagcatcaaatcctgctgctttcaatttttcctgcaaggcaatagcatttgctttgttgcgatacgctccgacctgtacacgataaataga

SEQ ID NO: 34930 - DNA, 260 bp, Unknown
  Description of Unknown: RightRegion for integrase B8931 sequence
atcataaaagaactgcacatctatcgtggcaccgttcaaggtccgcctatttttttataattaagtcgcagtaactatcatggatagaactcactggtatagtaactactactaaacttaatcccattctgaaataagaacaacccccggcgtaggaaagcacacctagccgggggtatctgttcatccgtttaacaggtcatacaactgcatcgcctgatactggctgtatccggcatctacgagggcggcaattttat

SEQ ID NO: 34931 - DNA, 260 bp, Unknown; identical to SEQ ID NO: 34920
  Description of Unknown: RightRegion for integrase B8932 sequence

SEQ ID NO: 34932 - DNA, 260 bp, Unknown
  Description of Unknown: RightRegion for integrase B8933 sequence
ataaaagaaatctatttgaatgaagcctttgaaattactggctttatattttatatctaggacttgtactaaataactatttcctagcgggaatctgaattgtttttctgcgctggcaaaatggcttgaagtcatggtcacgacgtgatccgcatagccggccgctacacacatcgcaccgagagacagcgattccccacaggtactgcaggctccgtaaagtccaaagagcggtacctgaaaatccagcaccccaaacg

SEQ ID NO: 34933 - DNA, 86 bp, Unknown; identical to SEQ ID NO: 34901
  Description of Unknown: RightRegion for integrase B8934 sequence

SEQ ID NO: 34934 - DNA, 260 bp, Unknown
  Description of Unknown: RightRegion for integrase B8935 sequence
ataaaagaaatttatttgaatgaagcctttgaaattactggctttatattttatatctagtacttgtactaaataactatttcctagcgggaatctgaattgtttttctgcgctggcaaaatggcttgaagtcatggtcacgacgtgatccgcatagccggccgctacacacatcgcaccgagagacagcgattccccacaggtactgcaggctccgtaaagtccaaagagcggtacctgaaaatccagcaccccaaacg

SEQ ID NO: 34935 - DNA, 109 bp, Unknown
  Description of Unknown: RightRegion for integrase B8936 sequence
attgtcaaagaaatcaaaatataccctgataggcacatagaatattccttaaatgtgtgaaaaaattttccaaaagtttattacttaatattacttcctctgtggatgg

SEQ ID NO: 34936 - DNA, 260 bp, Unknown
  Description of Unknown: RightRegion for integrase B8937 sequence
atcgaggttgaagggctttacccgaagcaagtcttttttatcggtcaggaaagactctaacgtacatgacagttctgtcacgttatttagaggctaccatccctataccatagtgaagtattttgcaaccttatacggtggtgcgtcctcgtcgttcaggaagtcctgtgccaagtcgaaatagaagtctggagagtcacctgcatatttctgtccagtatccttggagtcgttataatacatattcattgccagataaa

SEQ ID NO: 34937 - DNA, 260 bp, Unknown
  Description of Unknown: RightRegion for integrase B8938 sequence
ataaaagaaatttatttgaatgaagcctttgaaattactggctttatattttatatctaggacttgtactaagcaactatttcctagcgggaatctgaattgtttttctgcgctggcaaaatgacttgaagtcatggtcacgacgtgatccgcatagccggccgctacacacatcgcaccgagagacagcgattccccacaggtactgcaggctccgtaaagtccaaagagcggtacctgaaaatccagcaccccaaacg

SEQ ID NO: 34938 - DNA, 260 bp, Unknown
  Description of Unknown: RightRegion for integrase B8939 sequence
gaggctattaaacagataaccataacccacgataaaataaacatagatttcaatttatagggaggttcgacgtggtacattcatgccaactgatgtgccaagtcgaaaatatgaaaatgacaagaagggaagcacttttacgtgcaattaaatatgtcggggacaatgaccctgagcttacacataaactcaatgagatgatagaggatatgcctatgacgcattggagcgctgcggcgtgctatgatgcgatagaggat

SEQ ID NO: 34939 - DNA, 260 bp, Unknown
  Description of Unknown: RightRegion for integrase B8940 sequence
ataaaagaaatttatttgaatgaagcctttgaaattactggctttatattttatatctaggacttgtactaaataactatttcctagaggttaacatcaattagtataagtctattaaaaagggcgattagaaattctaaccgccctttattttacgcttttacaatcgcagcgtcaaatcctgccgatttcaatttttcctgcaaggtaactgcgttatctctgttccggtatgctcctacctgcactctgtaaatact

SEQ ID NO: 34940 - DNA, 260 bp, Unknown
  Description of Unknown: RightRegion for integrase B8941 sequence
ataaaagaaatttatttgaatgaagcctttgaaattactggctttatattttatatctaggacttgtactaaataactatttcctagcggttaacattaattagtacaagtctattaaaaagggcgattagaaattctaaccgccctttgttttacgcttttacaatcgcagcatcaaatcctgctgctttcaatttttcctgcaaggcaatagcatttgctttgttgcgatacgctccgacctgtacacgataaataga

SEQ ID NO: 34941 - DNA, 260 bp, Unknown
  Description of Unknown: RightRegion for integrase B8942 sequence
ataaaagaaatttatttgaatgaagcctttgaaattactggctttatattttatatctaggacttgtactaaataactatttcctagtgggaatctgaattgtttttctgcgctggcaaaatgacttgaagtcatggtcacgacgtgatccgcatagccggccgctacacacatcgcaccgagagacagcgattccccacaggtactgcaggctccgtaaagtccaaagagcggtacctgaaaatccagcaccccaaacg

SEQ ID NO: 34942 - DNA, 260 bp, Unknown
  Description of Unknown: RightRegion for integrase B8943 sequence
cgcacgatccagcgcatcgacgcagacaatgacggtgcgttttttgtaacgcccagttagtcttattttcacgtcacaacgcctacgtcaaaatataactaaccccccggcatttgccgaggggtttaagtttagctttccaatttccgcatgacgctattataaacccgctcgttgaccactttcaagctgtccatcagctcgtccatgacctcccacgcacgggctgggtcaacgttagacgccgcccggagaaattc

SEQ ID NO: 34943 - DNA, 260 bp, Unknown
  Description of Unknown: RightRegion for integrase B8944 sequence
ataaaagaaatttatttgaatgaagcctttgaaattactggctttatattttatatctaggacttgtactaagcaactatttcctagtggttaacattaattagtacaagtatattaaatcgaactataatgaatgcattcttatcaaacataggtttttctgtaaccattaattttactgtgttttgagcattttttatttgcttataaaatggcagatttgccatagaagtatataaaatgcaacacgaaattgaaca

SEQ ID NO: 34944 - DNA, 260 bp, Unknown
  Description of Unknown: RightRegion for integrase B8945 sequence
atcctccgtgagctccatgtctaccgcggcaccattcagggcccgccggtttttttgtgaaattcagtcgtatttattgacatagtgcattctatcctttatactaaataccacaaaaacctgcaattcaaggaatttctggaaaagtgtgttttaatgtagaaaaacagggaaaaggggtatttggatggacgcgcggggattggtgaaggcgctgggggtgccggcgcactgggacgggtgcttgcagctggagtatg

SEQ ID NO: 34945 - DNA, 260 bp, Unknown; identical to SEQ ID NO: 34912
  Description of Unknown: RightRegion for integrase B8946 sequence

SEQ ID NO: 34946 - DNA, 260 bp, Unknown
  Description of Unknown: RightRegion for integrase B8947 sequence
cgcacgatccagcgcatcgacgcagacaatgacggtgcgttttttgtaacgcctagttagtcttattttcatgtcacaacgcctacgtcaaaatataactaaccccccggcatttgccgagggggttaagtttagctttccaatttccgcatgacgctattataaacccgctcgttgatcactttcaagctgtccatcagctcgtccatgacctcccacgcacgggctgggtcaacgttagacaccgcccggaggaaatc

SEQ ID NO: 34947 - DNA, 260 bp, Unknown
  Description of Unknown: RightRegion for integrase B8948 sequence
ataaaagaaatttatttgaatgaagcctttgaaattactggctttatattttatatctaggacttgtactaaataactatttcctagaggttaacattaattagtacaagtctattataaagggcgattagaaattctaaccgccctttattttacgcttttacaatcgcagcgtcaaatcctgccgatttcaatttttcctgcaaggcaatagcatttgctttattgcgatacgctccgacctgtacacgataaataga

SEQ ID NO: 34948 - DNA, 260 bp, Unknown
  Description of Unknown: RightRegion for integrase B8949 sequence
ataaaagaaatttatttgaatgaagcctttgaaattactggctttatattttatatctaggacttgtactaaataactatttcctagcgggaatctgaattgtttttctgcgctggcaaaatgacttgaagtcatggtcacgacgtgatccgcatagcctgccgctacacacatcgcaccgagagacagcgattccccacaggtactgcaggctccgtaaagtccaaagagcggtacctgaaaatccagcaccccaaacg

SEQ ID NO: 34949 - DNA, 260 bp, Unknown
  Description of Unknown: RightRegion for integrase B8950 sequence
attatcaaagaaatcaaaatttaccctgataggcacatagaatattccttaaatgtttgaaaaatttttaatgaattttattacttaatatttctccctgtgtagttgcgataatattatgtaataaaatccccgccctcacaagagagcggggactatcgtcagtgcttcacgacaaactcatagtaccgagcgagtttgtccggagcggcgtcctggtcgtccagaaacgctttcgcaatttcggcatagaagtcgat

SEQ ID NO: 34950 - DNA, 260 bp, Unknown; identical to SEQ ID NO: 34940
  Description of Unknown: RightRegion for integrase B8951 sequence

SEQ ID NO: 34951 - DNA, 260 bp, Unknown
  Description of Unknown: RightRegion for integrase B8952 sequence
ataaaagaaatttatttgaatgaagcctttgaaattactggctttatattttatatctaggacttgtactaaacaactattttctaaaggttaacattaattagtacaagtttattaaaaatggcgattagaaattctaaccgccatttattttacgcttttacaatcgcagcatcaaaccctgctgctttcaatttttcctgcaaggtaactgcgttatctctgttccggtatgatcctacctgcactctgtaaatgct

SEQ ID NO: 34952 - DNA, 260 bp, Unknown
  Description of Unknown: RightRegion for integrase B8953 sequence
cgcacgatccagcgcatcgacgcagacaatgacggtgcgttttttgtaacgcccagttagtcttattttcatgtcacaacactaacattaaaatataactaaccccccggcatttgccgaggggttaaatttagctttccaatttccgcatgacgctattataaacccgctcgttgaccactttcaagctgtccatcagctcgtccatgacctcccacgcacgggctgggtcaacgttagataccgctcggaggaaatcg

SEQ ID NO: 34953 - DNA, 260 bp, Unknown
  Description of Unknown: RightRegion for integrase B8954 sequence
ataaaagaaatttatttgaatgaagcctttgaaattactggctttatattttatatctaggacttgtactaaataactatttcctagaggttaacattaattagtacaagtctattaaatcgaactataatgaatgcattcttatcaaactaggttttactgtaacaattgattttactgtgttttgatcattttttatttgcttataaaataacagatttgccatagaagtatataaaatgcaacacgaaattggacat

SEQ ID NO: 34954 - DNA, 260 bp, Unknown
  Description of Unknown: RightRegion for integrase B8955 sequence
cgcacaatccagcgcatcgacgcagacaatgacggtgcgttttttgtaacgccaagttagtcttattttcacgtcgcaacgcttacgttaaaatataactaaccccccggcatttgccgagggggttaagtttagctttccaatttccgcatgacgctattataaacccgctcgttgatcactttcaaactgtccatcagctcgtccatgacctcccacgcacgggctgggtcaacgttagacaccgcccgaaggaaatc

SEQ ID NO: 34955 - DNA, 260 bp, Unknown
  Description of Unknown: RightRegion for integrase B8956 sequence
ataaaagaaatttatttgaatgaagcctttgaaattactggctttatattttatatctaggacttgtactaaataactatttcctagaggttaacataaattagtacaagtctattaaaaagggcgattagaaattctaaccgccctttattttacgcttttacaatcgcagcatcaaatcctgctgctttcaatttttcctgcaatgcaactgcgttatctctgttccggtatgctcctacctgcactctgtaaatgct

SEQ ID NO: 34956 - DNA, 260 bp, Unknown
  Description of Unknown: RightRegion for integrase B8957 sequence
cgcacaatccagcgcatcgacgcagacaatgacggtgcgttttttgtaacgccaagttagtcttattttcatgtcgcaacgcctacattaaaatataactaacccctcggcatttgtcgaggggttaagtttagctttccaatttccgcatgacgctattgtaaacccgctcgttgaccactttcaagctgtccatcagctcgtccatgacctcccacgcacgggctgggtcaacgttagacaccgcccggaggaaatcg

SEQ ID NO: 34957 - DNA, 260 bp, Unknown
  Description of Unknown: RightRegion for integrase B8958 sequence
ataaaagaaatttatttgaatgaagcctttgaaattactggctttatattttatatctaggacttgtactaaataactatttcctagcggttaacattaattagtacaagtctattaaaaatggcgattagaaattctaaccgccatttattttacgcttttacaatcgcagcgtcaaatcctgccgatttcaatttttcctgcaaggaaatagcatttgctttgttgcgatacgctccgacctgtacacgataaataga

SEQ ID NO: 34958 - DNA, 260 bp, Unknown
  Description of Unknown: RightRegion for integrase B8959 sequence
cgcacaatccagcgcatcgacgcagacaatgacggtgcgttttttgtaacgccaagttagtcttattttcatgtcgcaacgctaacgttaaaatataactaaccccccggcatttgccgaggggttaagtttagctttccaatttccgcatgacgctattgtaaacccgctcgtttatcacctgcaagctgtccatcagctcgtccatgacctcccacgcacgggctgggtcaacgttagacaccgcccggaggaaatcg

SEQ ID NO: 34959 - DNA, 260 bp, Unknown
  Description of Unknown: RightRegion for integrase B8960 sequence
ataaaagaaatttatttgaatgaagcctttgaaattactggctttatattttatatctaggacttgtactaaataactatttcctagaggttaacattaattagtacaagtctattaaaaatggcgattagaaattctaaccgccatttattttacgcttttacaatcgcagcgtcaaatcctgccgatttcaatttttcctgcaaggcaatagcatttgctttattgcgatacgctccgacctgtacacgataaataga

SEQ ID NO: 34960 - DNA, 260 bp, Unknown
  Description of Unknown: RightRegion for integrase B8961 sequence
cgcacaatccagcgcatcgacgcagacaatgacggtgcgttttttgtaacgccaagttagtcttattttcatgtcgcaacactaacattaaaatataactaaccccccggcatttgccgaggggttaaatttagctttccaatttccgcatgacgctattgtaaacccgctcgttgaccactttcaagctgtccatcagctcgtccatgacctcccacgcacgggctgggtcaacgttagacaccgctcggaggaaatcg

SEQ ID NO: 34961 - DNA, 260 bp, Unknown
  Description of Unknown: RightRegion for integrase B8962 sequence
cgcacaatccagcgcatcgacgcagacaatgacggtgcgttttttgtaacgccaagttagtcttattttcacgtcgcaacgcttacgttaaaatataactaaccccccggcatttgccgagggggttaagtttagctttccaatttccgcatgacgctattataaacccgctcgttgaccactttcaaactgtccatcagctcgtccatgacctcccacgcacgggctgggtcaacgttagacaccgcccgaaggaaatc

SEQ ID NO: 34962 - DNA, 260 bp, Unknown
  Description of Unknown: RightRegion for integrase B8963 sequence
ataaaagaaatttatttgaatgaagcctttgaaattactggctttatattttatatctaggacttgtactaaataactatttcctagtggttaacgttaattagtacaagcctattaaaaagggcgattagaaattctaaccgccctttattttacgcttttacaatcgcagcatcaaatcctgctgctttcaatttttcctgcaaagcaatagcatttgctttgttgcgatacgccccgacctgtacacgataaataga

SEQ ID NO: 34963 - DNA, 260 bp, Unknown
  Description of Unknown: RightRegion for integrase B8964 sequence
cgcacaatccagcgcatcgacgcagacaatgacggtgcgttttttgtaacgccaagttagtcttattttcatgttgcaacactaacataaaaatataactaaccccccggcatttgccgaggggttaaatttagcttttcaatttccgcatgacgctattataaacccgctcgttgaccactttcaagctgtccatcagctcgtccatgacctcccacgcacgggctgggtcaacgttagacaccgcccggaggaaatcg

SEQ ID NO: 34964 - DNA, 260 bp, Unknown
  Description of Unknown: RightRegion for integrase B8965 sequence
ataaaagaaatttatttgaatgaagcctttgaaattagtggctttatattttatatctaggacttgtactaaataactgtttcctagcgggaatctgaattgtttttctgcgctggcaaaatgacttgaagtcatggtcacgacgtgatccgcatagcctgccgctacacacatcgcaccgagagacagcgattccccacaggtactgcaggctccgtaaagtccaaagagcggtacctgaaaatccagcaccccaaacg

SEQ ID NO: 34965 - DNA, 260 bp, Unknown
  Description of Unknown: RightRegion for integrase B8966 sequence
ataaaagaaatttatttgaatgaagcctttgaaattactggctttatattttatatctaggacttgtactaagcaactatttcctagcggttaacattaattagtacaagtctattaaaaatggcgattagaaattctaaccgccatttattttacgcttttacaatcgcagcgtcaaatcctgctgctttcaatttttcctgcaaggaaatagcatttgctttgttgcgatacgctccgacctgtacacgataaataga

SEQ ID NO: 34966 - DNA, 260 bp, Unknown
  Description of Unknown: RightRegion for integrase B8967 sequence
atcgaggttgaggggctttacccgaagcaagtcttttttatcggtcaggaaagactctaacgtacatgacagttctgtcacgttacttagaggctaccatccctataccatagtgaagtattttgcaaccttatacggtggtgcgtcctcgtcgttcaggaagtcctgtgccaagtcgaaatagaagtccggagagtcacctgcatatttctgtccagtatccttggagtcgttataatacatattcattgccagataaa

SEQ ID NO: 34967 - DNA, 260 bp, Unknown
  Description of Unknown: RightRegion for integrase B8968 sequence
atcgaggttgaggggctttacccgaagcaagtcttttttatcggtcaggaaagcctctaacgtacatgacagttctgtcacgttacttagaggctaccatccctataccatagtgaagtattttgcaaccttatacggtggtgcgtcctcgtcgttcaggaagtcctgtgccaagtcgaaatagaagtctggagagtcacctgcatatttctgtccagtatccttggagtcgttataatacatattcattgccagataaa

SEQ ID NO: 34968 - DNA, 260 bp, Unknown
  Description of Unknown: RightRegion for integrase B8969 sequence
ataaaagaaatttatttgaatgaagcctttgaaattactggctttatattttatatctaggacttgtactaaataactatttcctagcggttaacattaattagtacaagtctattaaaaatggcgattagaaattctaaccgccatttattttacgcttttacaatcgcagagtcaaatcctgctgctttcaatttttcctgcaaggaaatagcatttgctttgttgcgatacgctccgacctgtacacgataaataga

SEQ ID NO: 34969 - DNA, 260 bp, Unknown
  Description of Unknown: RightRegion for integrase B8970 sequence
atcataaaagaactgcacatctatcgtggcaccgttcaaggtccgcctatttttttataattaagtcgcagtaactatcatggatagaatgcgcttggctacaccaaccgcccgctggacggcatcttcggcggcggcacggaaaacgcggtgcgtgcgttccagcgcgccgtgagcctgacggcggacggcatctgcggctgcaacacctggaaaaagctgacggcggccagcgtgggcatcggccgcacccgcacagt

SEQ ID NO: 34970 - DNA, 260 bp, Unknown
  Description of Unknown: RightRegion for integrase B8971 sequence
ataaaagaaatttatttgaatgaagcctttgaaattactggctttatattttatatctaggacttgtactaaataactatttcctagaggttaacattaattagtacaagtctattaaaaatggcgattagaaattctaaccgccatttattttacgcttttacaatcgcagcgtcaaatcctgctgctttcaatttttcctgcaaggaaatagcatttgctttgttgcgatacgctccgacctgtacacgataaataga

SEQ ID NO: 34971 - DNA, 260 bp, Unknown
  Description of Unknown: RightRegion for integrase B8972 sequence
ataaaagaaatttatttgaatgaagcctttgaaattactggctttatattttatatctaggacttgtactaaataactatttcctagaggttaacatcaattagtacaagtctattaaaaagggcgattagaaattctaaccgccatttattttacgcttttacaatcgcagcgtcaaatcctgctgctttcaatttttccttcaaggaaatagcatttgctttgttgcgatacgctccgacctgtacacgataaataga

SEQ ID NO: 34972 - DNA, 260 bp, Unknown
  Description of Unknown: RightRegion for integrase B8973 sequence
ataaaagaattttatttgaatgaagcctttgaaattactggctttatattttatatctaggacttgtactaaataactatttcctagcgggaatctgaattgtttttctgcgctggcaaaatgacttgaagtcatggtcacgacgtgatccgcatagccggccgctacacacatcgcaccgagagacagcgattccccacaggtactgcaggctccgtaaagtccaaagagcggtacctgaaaatccagcaccccaaacg

SEQ ID NO: 34973 - DNA, 260 bp, Unknown
  Description of Unknown: RightRegion for integrase B8974 sequence
cgcacgatccagcgcatcgacgcagacaatgacggtgcgttttttgtaacgcctagttagtcttattttcatgtcacaacgcctacgttaaaatataactaaccccccggcatttgccgagggggttaagtttagctttccaatttccgcatgacgctattatacacccgctcgttgaccactttcaagctgtccatcagctcgtccatgacctcccacgcacgggccgggtcaacgttagacaccgcgcggagaaaatc

SEQ ID NO: 34974 - DNA, 260 bp, Unknown
  Description of Unknown: RightRegion for integrase B8975 sequence
atcgaggttgaagggctttacccgaagcaagtcttttttatcggtcaggaaagactctaacgtacatgacagttctgtcacgtcacttagaggctaccatccctataccatagtgaagtattttgcaaccttatacggtggtgcgtcctcgtcgttcaggaagtcctgtgccaagtcgaaatagaagtctggagagtcacctgcatatttctgtccagtatccttggagtcgttataatacatattcattgccagataaa

SEQ ID NO: 34975 - DNA, 260 bp, Unknown; identical to SEQ ID NO: 34929
  Description of Unknown: RightRegion for integrase B8976 sequence

SEQ ID NO: 34976 - DNA, 260 bp, Unknown
  Description of Unknown: RightRegion for integrase B8977 sequence
ataaaagaaatttatttgaatgaagcctttgaaattactggctttatattttatatctaggacttgtactaaataactatttcctaaaggaaaacggaactgtttctctgcactggcgaaatggctcgatgtcatggtcacaacatggtcggcatagcctgccgccacacacatcgcgccaagcgacaatgattctccgcacgtgctgcatgccccgtataatccgaaaagcggcacctgaaaatccagcacgccgaaag

SEQ ID NO: 34977 - DNA, 260 bp, Unknown
  Description of Unknown: RightRegion for integrase B8978 sequence
cgcacaatccagcgcatcgacgcagacaatgacggtgcgttttttgtaacgcccagttagtcttattttcatgtcgcaacgctaacgttaaaatataactaaccccccggcatttgccgaggggttaaatttagctttccaatttccgcatgacgctattataaacccgctcgttgaccactttcaagctgtccatcagctcgtccatgacctcccacgcacgggctgggtcaacgttagacaccgcccgaaggaaatcg

SEQ ID NO: 34978 - DNA, 260 bp, Unknown; identical to SEQ ID NO: 34948
  Description of Unknown: RightRegion for integrase B8979 sequence

SEQ ID NO: 34979 - DNA, 260 bp, Unknown
  Description of Unknown: RightRegion for integrase B8980 sequence
ataaaagaaatttatttgaatgaagcctttgaaattactggctttatattttatatctaggacttgtactaagtaactatttcctagcgggaatctgaattgtttttctgcgctggcaaaatggcttgaagtcatggtcacgacgtgatccgcatagccggccgctacacacatcgcaccgagagacagcgattccccacaggtactgcaggctccgtaaagtccaaagagcggtacctgaaaatccagcaccccaaacg

SEQ ID NO: 34980 - DNA, 260 bp, Unknown
  Description of Unknown: RightRegion for integrase B8981 sequence
ataaaagaaatttacttgaatgaagcctttgaaattactggctttatattttatatctaggacttgtactaaataactatttcctagcgggaatctgaattgtttttctgcgctggcaaaatggcttgaagtcatggtcacgacgtgatccgcatagccggccgctacacacatcgcaccgagagacagcgattccccacaggtactgcaggctccgtaaagtccaaagagcggtacctgaaaatccagcaccccaaacg

SEQ ID NO: 34981 - DNA, 260 bp, Unknown
  Description of Unknown: RightRegion for integrase B8982 sequence
cgcacgattcagcgcatcgacgcagacaatgacggtgcgttttttgtaacgccaagttagtcttattttcatgtcacaacgcctatattaaaatataactaaccccccggcatttgccgaggggttaagtttagctttccaatttccgcatgacgctattataaacccgctcattgaccactttcaagctgtccatcagctcgtccatgatctcccacgcacgggctgggtcaacgttagacaccgcccggaggaaatcg

SEQ ID NO: 34982 - DNA, 260 bp, Unknown
  Description of Unknown: RightRegion for integrase B8983 sequence
ataaaagaaatttatttgaatgaagcctttgaaattactggctttatattttatatctaggacttgtactaaataactatttcctagaggttaacattaattagtacaagtctattaaatcgaactataatgaatgcattcttatcaaacctaggttttactgtaaccattgattttactttgttttgagcattttttatttgcttataaagtggcaaatttgccatataagtatataaaatgaaacacgaaattgaacg

SEQ ID NO: 34983 - DNA, 260 bp, Unknown
  Description of Unknown: RightRegion for integrase B8984 sequence
ataaaagaaatttatttgaatgaagcctttgaaattactggctttatattttatatctaggacttgtactaaataactatttcctagaggttaacatcaattagtacaagtctattaaaaagggcgattagaaattctaaccgccctttattttacgcttttacaatcacagcgtcaaatcctgccgatttcaatttttcctgcaaggcaatagcatttgctttattgcgatacgctccgacctgtacacgataaataga

SEQ ID NO: 34984 - DNA, 260 bp, Unknown
  Description of Unknown: RightRegion for integrase B8985 sequence
ataaaagaaatttatttgaatgaagcctttgaaattactggctttatattttatatctagggcttgtactaaataactatttcctaaaggaaaacggaactgtttctctgcactggcgaaatggctcgatgtcatggtcacaacatggtcggcatagcctgccgccacacacatcgcgccaagcgacaatgattctccgcacgtgctgcatgccccgtataatccgaaaagcggcacctgaaaatccagcacgccgaaag

SEQ ID NO: 34985 - DNA, 260 bp, Unknown
  Description of Unknown: RightRegion for integrase B8986 sequence
ataaaagaaatttatttgaatgaagcctttgaaattactggctttatattttatatctaggacttgtactaaataactatttcctagcgggaatctgaattgtttttctgcgctggcaaaatggcttgaagtcatggtcacgacatggtccgcatagccggccgctacacacatcgcgccgagagacagcgattctccacaggtactacaggctccgtaaagtccaaagagcggtacctgaaaatccagcaccccaaacg

SEQ ID NO: 34986 - DNA, 260 bp, Unknown; identical to SEQ ID NO: 34947
  Description of Unknown: RightRegion for integrase B8987 sequence

SEQ ID NO: 34987 - DNA, 260 bp, Unknown
  Description of Unknown: RightRegion for integrase B8988 sequence
ataaaagaaatttatttgaatgaagcctttgaaattactggctttatattttatatctaggacttgtactaaacagctatttcctagaggttaacatcaattagtacaagtctattaaaaagggcgattagaaattctaaccgccctttattttacgcttttacaatcgcaacatcaaatcctgctactttcaatttttcctgcaatgcaactgcgttatctctgttccggtatgctcctacctgcactctgtaaatgct

SEQ ID NO: 34988 - DNA, 260 bp, Unknown
  Description of Unknown: RightRegion for integrase B8989 sequence
aaagaaatagaaaaaaatctaaaaagaggagctgatggaaaatgggtaaagtcagagtaataccatcaacgattaatcctttaacgcatcaaagtattgtcgccaatgtgaaaagaaaagtagctgcttatgcacgtgtttcaactgattcagatgaacaatatacttcatatgaagctcaagttaattattacactggttatattcagtcaagagtagactgggaatacatcaatgtttatgcggatgaaggaatatct

SEQ ID NO: 34989 - DNA, 260 bp, Unknown
  Description of Unknown: RightRegion for integrase B8990 sequence
ataaaagaaatttatttgaatgaagcctttgaaattactggctttatattttatatctaggacttgtactaaacagctattttctaaaggttaacattaattagtacaagtatattaaaaaaggcgattagaaattctaaccgccctttattttacgctttcacaatggcaacttcaaatcctgctgctttcaatttatttttcatatacagttacatatttttctgatgctgtaatgtataatcccgatttgagcctat

SEQ ID NO: 34990 - DNA, 260 bp, Unknown
  Description of Unknown: RightRegion for integrase B8991 sequence
ataaaagaaatttatttgaatgaagcctttgaaattactggctttatattttatatctaggacttgtactaaataactatttcctagcgggaatctgaattgtttttctgcgctggcaaaatggcttgaagtcatggtcacgacgtgatccgcatagccggccgctacacacatcgcaccgagagacagcgattccccacaggtactgcaggctccgtaaagtccaaagagcggtacctgaaaatccagcaccccaaacg

SEQ ID NO: 34991 - DNA, 260 bp, Unknown; identical to SEQ ID NO: 34884
  Description of Unknown: RightRegion for integrase B8992 sequence

SEQ ID NO: 34992 - DNA, 260 bp, Unknown
  Description of Unknown: RightRegion for integrase B8993 sequence
cgcacaatccagcgcatcgacgcagacaatgacggtgcgttttttgtaacgccaagttagtcttattttcatgtcacaacgcctacgttaaaatataactaaccccccggcatttgccgaggggttaagtttagctttccaatttccgcatgacgctattataaacccgctcgttgaccactttcaagctgtccatcagatcgtccatgacctcccacgcacgggctgggtcaacgttagataccgctcgtaggaaatcg

SEQ ID NO: 34993 - DNA, 132 bp, Unknown
  Description of Unknown: RightRegion for integrase B8994 sequence
cgcacaatccagcgcatcgacgcagacaatgacggtgcgttttttgtaacgcccagttagtcttattttcatgtcgcaacgctaacgttaaaatataactaaccccccggcatttgccgaggggttaaattt

SEQ ID NO: 34994 - DNA, 86 bp, Unknown; identical to SEQ ID NO: 34901
  Description of Unknown: RightRegion for integrase B8995 sequence

SEQ ID NO: 34995 - DNA, 260 bp, Unknown
  Description of Unknown: RightRegion for integrase B8996 sequence
cgcacaatccagcgcatcgacgcagacaatgacggtgcgttttttgtaacgccaagttagtcttattttcatgtcacaacgcctacgtcaaaatataactaaccccccggcatttgccgaggggttaaatttagctttccaatttccgcatgacgctattataaacccgctcgttgaccactttcaagctgtccatcagctcgtccatgacctcccacgcacgggctgggtcaacgttagacaccgcccggaggaaatcg

SEQ ID NO: 34996 - DNA, 260 bp, Unknown
  Description of Unknown: RightRegion for integrase B8997 sequence
attgtaaaagaaataaaaatatcccccgacacttacgtggaggatattatatttttttagtttttgttatacagtaactagccgaaaccaccaggttaaggtcagttaccgtataacaaaatatgatagaaataaaggagaagtaattatattatacaagaagaaagaggacgtttcaagcgccctcttttatttttcgcaaaactgaccgatattcacgcgggtacattgcttctatggctttcatgtgttcatcaagt

SEQ ID NO: 34997 - DNA, 260 bp, Unknown
  Description of Unknown: RightRegion for integrase B8998 sequence
attgtaaaagaaataaaaatatcccccaacgaatttgtggaggatattatatttttttagtttttgttatgcagtaactagccgtaaccaccgggttaaaaccagttactgcataacaaaatattaaaaataaaggagatacagttacattatacagaaagaaagaggacgtttcaagcgccctcttttatttttcgcaaaaccgaacgatattctcgcggatacattgcttctatggctttcatgtgttcgtcaagtac

SEQ ID NO: 34998 - DNA, 260 bp, Unknown; identical to SEQ ID NO: 34997
  Description of Unknown: RightRegion for integrase B8999 sequence

SEQ ID NO: 34999 - DNA, 260 bp, Unknown
  Description of Unknown: RightRegion for integrase B9000 sequence
attgtaaaagaaataaaaatatcccccaacgaatttgtggaggatattatatttttttagtttttgttatgcagtaactagccgtaaccaccagattaaagctagttactacataactaaatattaaaaataaaggagatacagttacattatacaaaaagaaagaggatgtttcaagcaccctcttttatttttcgcaaaactgaccgatattcacgcgggtacattgcttcgatggctttcatgtgttcgtcaagcac

SEQ ID NO: 35000 - DNA, 260 bp, Unknown
  Description of Unknown: RightRegion for integrase B9001 sequence
attatacgggaaatccccgtgaacaacggcgctgtatcaggcgatccgatttttttataattttccgttgtactttctatattcacgacaccaacgccacaaagaacacggccgccgcgctgccggacgtcatccgctggttcaaaaacgcaggctaccgcttcgataccgtggaccatctggaaaaaaagccgtaaccgccgccgtcgccccgcctgctgtggacaaaatacggccggaatatgaaaaaaatgcaaatt

SEQ ID NO: 35001 - DNA, 260 bp, Unknown; identical to SEQ ID NO: 34997
  Description of Unknown: RightRegion for integrase B9002 sequence

SEQ ID NO: 35002 - DNA, 260 bp, Unknown
  Description of Unknown: RightRegion for integrase B9003 sequence
attgtaaaagaaataaaaatatcccccgacacttacgtggaggatattatatttttttagtttttgttatacagtaactagccgtaaccaccaggttaaggtcagttaccgtataacaaaatatgatagaaataaaggagaagtaattatattatacaagaagaaagaggacgtttcaagcgccctcttttatttttcgcaaaactgaccgatattctcgcggatacattgcttctatagctttcatgtgttcgtcaagc

SEQ ID NO: 35003 - DNA, 96 bp, Unknown
  Description of Unknown: RightRegion for integrase B9004 sequence
attgtaaaagaaataaaaatatcccccgacacttacgtggaggatattatatttttttagtttttgttatacagtaactagccgaaaccaccaggt

SEQ ID NO: 35004 - DNA, 260 bp, Unknown
  Description of Unknown: RightRegion for integrase B9005 sequence
aaaacagtcaaaaaaatctatttatctagcgattcagtggccgattttgatttaatctaagccgttatataatatgattaaaccgtcaggttttatcatattatataacgcataaaatgagccccagaaactggggctcatttgctacactgcgtctattttccgcataacgctattgtacactcttgtgttgactactttgagcgtgtccattaactcatccatgatatcccacaccgccgcagggtctttgccctcca

SEQ ID NO: 35005 - DNA, 260 bp, Unknown
  Description of Unknown: RightRegion for integrase B9006 sequence
cgcatcattacgcgaatagagatgaatgatcagcagaatctcaaagtatttttttcataatttaatttatcctaataatacattaccgacatataaagtattattaggataataataaatattccacatatagtttttttaatccttggcagaacctacaactttgcctttttctgtgcgctaaaaaaatacgtcaatattggcatttattttttatatctacttgacataatgccattattggcgtattatatagatat

SEQ ID NO: 35006 - DNA, 260 bp, Unknown
  Description of Unknown: RightRegion for integrase B9007 sequence
attgtaaaagagataaaaatatcccccaacgagtttgtggaggatattatatttttttagtttttgttatgtagtaactagccgtaaccaccagattaaagctagttactacataactaaatataaaaaataaaggagatacagttacattatataaaaagaaagaggatgtttcaagcaccctcttttatttttcgcaaaactgaccgatattctcgcggatacattgcttctatggctttcatgtgttcatcaagtac

SEQ ID NO: 35007 - DNA, 260 bp, Unknown; identical to SEQ ID NO: 35002
  Description of Unknown: RightRegion for integrase B9008 sequence

SEQ ID NO: 35008 - DNA, 260 bp, Unknown
  Description of Unknown: RightRegion for integrase B9009 sequence
attgtaaaagagataaaaatatcccccaacgagtttgtggaggatattatatttttttagtttttgttatacagtaactagccgtaaccaccaggttaaggtcagttaccgtataacaaaacatgatagaaataaaggagaagtaattatattatacaagaagaaagaggacgtttcaagcgccctcttttatttttcgcaaaactgaccgatattctcgcggatacattgcttctatggctttcatgtgttcgtcaagc

SEQ ID NO: 35009 - DNA, 142 bp, Unknown
  Description of Unknown: RightRegion for integrase B9010 sequence
attgtaaaagaaataaaaatatcccccgacacttacgtggaggatattatatttttttagtttttgttatacagtaactagccgaaaccaccaggtagcataggtagaaaatttatacccttttctgtagtcaaacttttct

SEQ ID NO: 35010 - DNA, 260 bp, Unknown
  Description of Unknown: RightRegion for integrase B9011 sequence
aaaacagtcaaaaaaatctatttatctagcgattcagtggccgattttgatttaatctaagccgttatataatatgattaaaccgtcaggtttcatcatattatacaacgcgcaaaatgagccccagaaactggggctcatttgctacactgcgtctattttccgcataacgctattgtacactcttgtgttgactactttgagcgtgtccattaactcatccatgatatcccacaccgccgcagggtctttgccctcca

SEQ ID NO: 35011 - DNA, 260 bp, Unknown; identical to SEQ ID NO: 34949
  Description of Unknown: RightRegion for integrase B9012 sequence

SEQ ID NO: 35012 - DNA, 260 bp, Unknown
  Description of Unknown: RightRegion for integrase B9013 sequence
attgtaaaagaaataaaaatatcccccgacacttacgtggaggatattatatttttttagtttttgttatacagtaactagccgtaaccaccaggtagcataggtagaaaatttatacccttttctgtagtcaaacttttctaccgctttgatcagtccaagattgccttcctgaatcaaatcaagaaactgcatccccctgccggaataccgcttagcaatacttaccgtaagtcgaagattggcttcggaaagcttct

SEQ ID NO: 35013 - DNA, 260 bp, Unknown
  Description of Unknown: RightRegion for integrase B9014 sequence
attgtgaaagaaataaaaatatcccccgacacttacgtggaggatattatatttttttagtttttgttatgcagtaactagccgtaaccaccaggtagcataggtagaaaatttatacccttttctgtagtcaaacttttctaccgctttgatcagtccaagattgccttcctgaatcaaatcaagaaactgcatccccctgccggaataccgcttagcaatacttaccgtaagtcgaagattggcttcggaaagcttct

SEQ ID NO: 35014 - DNA, 95 bp, Unknown
  Description of Unknown: RightRegion for integrase B9015 sequence
attgtaaaagagataaaaatatcccccaacgagtttgtggaggatattatatttttttagtttttgttatacagtaactagccgtaaccaccagg

SEQ ID NO: 35015 - DNA, 260 bp, Unknown
  Description of Unknown: RightRegion for integrase B9016 sequence
attgtaaaagaaataaaaatatcccccaacgaatttgtggaggatattatatttttttagtttttgttatgcagtaactagccgtaaccaccgggttaaagctagttactgtataaataaatattaaaaataaaagagatacagttacattatacagaaagaaagaggacgtttcaagcgccctcttttatttttcgcaaaactgatcgatattcacgcgggtacattgcttcgatggctttcatgtgttcgtcaagcac

SEQ ID NO: 35016 - DNA, 260 bp, Unknown
  Description of Unknown: RightRegion for integrase B9017 sequence
attgtaaaagaaataaaaatatcccccgacaagtttgtggaggatattatatttttttagtttttgttatacagtaactagccgtaaccaccgggttaaaaccagttactgtataacaaaatgttaaaaataaaggagatacagttacattatacagaaagaaagaggacgtttcaagcgccctcttttatttttcgcaaaaccgaacgatattcacgcggatacattgcttctatggctttcatgtgttcgtcaagtac

SEQ ID NO: 35017 - DNA, 95 bp, Unknown
  Description of Unknown: RightRegion for integrase B9018 sequence
attgtaaaagaaataaaaatatcccccgacacttacgtggaggatattatatttttttagtttttgttatacagtaactagccgaaaccaccagg

SEQ ID NO: 35018 - DNA, 260 bp, Unknown
  Description of Unknown: RightRegion for integrase B9019 sequence
attgtaaaagaaataaaaatatcccccgacacttacgtggaggatattatatttttttagtttttgttatacagtaactagccgaaaccaccaggttaaggtcagttaccgtataacaaaatatgatagaaataaaggagaagtaattatattatacaagaagaaagaggacgtttcaagcgccctcttttatttttcgcaaaactgaccgatattctcgcggatacattgcttctatagctttcatgtgttcgtcaagc

SEQ ID NO: 35019 - DNA, 260 bp, Unknown; identical to SEQ ID NO: 35002
  Description of Unknown: RightRegion for integrase B9020 sequence

SEQ ID NO: 35020 - DNA, 260 bp, Unknown
  Description of Unknown: RightRegion for integrase B9021 sequence
attgtaaaagaaataaaaatatcccccgacacttacgtggaggatattatatttttttagtttttgttatacagtaactagccgaaaccaccaggtagcataggtagaaaatttatacccttttctgtagtcaaacttttctaccgctttgatcagtccaagattgccttcctgaatcaaatcaagaaactgcatccccctgccggaataccgcttggcaatacttaccgtaagtcgaagattggcttcagaaagcttct

SEQ ID NO: 35021 - DNA, 260 bp, Unknown; identical to SEQ ID NO: 35002
  Description of Unknown: RightRegion for integrase B9022 sequence

SEQ ID NO: 35022 - DNA, 260 bp, Unknown; identical to SEQ ID NO: 35002
  Description of Unknown: RightRegion for integrase B9023 sequence

SEQ ID NO: 35023 - DNA, 260 bp, Unknown
  Description of Unknown: RightRegion for integrase B9024 sequence
attgtaaaagaaataaaaatatcccccaacgaatttgtggaggatattatatttttttagtttttgttatgcagtaactagccgtaaccaccgggttaaaaccagttactgtataacaaaatattaaaaataaaggagatacagttacattatacagaaagaaagaggacgtttcaagcgccctcttttatttttcgcaaaaccgaacgatattctcgcggatacattgcttctatggctttcatgtgttcgtcaagtac

SEQ ID NO: 35024 - DNA, 260 bp, Unknown; identical to SEQ ID NO: 35004
  Description of Unknown: RightRegion for integrase B9025 sequence

SEQ ID NO: 35025 - DNA, 260 bp, Unknown
  Description of Unknown: RightRegion for integrase B9026 sequence
attgtaaaagaaataaaaatatcccccgacacttacgtggaggatattatatttttttagtttttgttatacagtaactagccgtaaccaccaggttaaggtcagttaccgtataacaaaatatgatagaaataaaggagaagtaattatattatacaagaagaaagaggacgtttcaagcgccctcttttatttttcgcaaaactgaccgatattctcgcggatacattgcttcgatggctttcatgtgttcgtcaagc

SEQ ID NO: 35026 - DNA, 260 bp, Unknown
  Description of Unknown: RightRegion for integrase B9027 sequence
attgtaaaagaaataaaaatatcccccgacacttacgtggaggatattatatttttttagtttttgttatacagtaactagccgtaaccaccaggttaaggtcagttaccgtataacaaaacatgatagaaataaaggagaagtaattatattatacaagaagaaagaggacgtttcaagcgccctcttttatttttcgcaaaactgaccgatattctcgcggatacattgcttctatggctttcatgtgttcgtcaagc

SEQ ID NO: 35027 - DNA, 260 bp, Unknown
  Description of Unknown: RightRegion for integrase B9028 sequence
attgtaaaagaaataaaaatatcccccgacacttacgtggaggatattatatttttttagtttttgttatacagtaactagccgtaaccaccaggtagcataggtagaaaatttatacccttttctgtagtcaaacttttctaccgctttgatcagtccaagattgccttcctgaatcaaatcaagaaactgcatccccctgccggaataccgcttggcaatacttaccgtaagtcgaagattggcttcggaaagcttct

SEQ ID NO: 35028 - DNA, 260 bp, Unknown
  Description of Unknown: RightRegion for integrase B9029 sequence
attgtaaaagaaataaaaatatcccccgacacttacgtggaggatattatatttttttagtttttgttatacagtaactagccgaaaccaccaggttaaggtcagttaccgtataacaaaatatgatagaaataaaggagaagtaattatattatacaagaagaaagaggacgtttcaagcgccctcttttatttttcgcaaaactgaccgatattctcgcggatacattgcttcgatggctttcatgtgttcgtcaagc

SEQ ID NO: 35029 - DNA, 260 bp, Unknown
  Description of Unknown: RightRegion for integrase B9030 sequence
attatacgggaaatccccgtgaacaacggcgctgtatcaggcgatccgatttttttataattttccgttgtactttctatatgcacgacaccaacgccacgaagaacacggccgccgcgctgccggacgttatccgctggttcaaaaatgcaggctaccgcttcgataccgtggaccatctggaaaaaaagccgtaaccgccgccgtcgccccgcctgctgtggacaaaatacggccggaatatgaaaaaaatgcaaatt

SEQ ID NO: 35030 - DNA, 260 bp, Unknown
  Description of Unknown: RightRegion for integrase B9031 sequence
attgtaaaagaaataaaaatatcccccaacgaatttgtggaggatattatatttttttaatatttagttatgtagtaactagccgtaaccaccaggtagcataggtagaaaatttatacccttttctgtagtcaaacttttctaccgctttgatcagtccaagattgccttcctgaatcaaatcaagaaactgcatccccctgccggaataccgcttggcaatacttaccgtaagtcgaagattggcttcagaaagcttc

SEQ ID NO: 35031 - DNA, 260 bp, Unknown; identical to SEQ ID NO: 35028
  Description of Unknown: RightRegion for integrase B9032 sequence

SEQ ID NO: 35032 - DNA, 92 bp, Unknown
  Description of Unknown: RightRegion for integrase B9033 sequence
attgtaaaagaaataaaaatatcccccgacacttacgtggaggatattatatttttttagtttttgttatacagtaactagccgtaaccacc

SEQ ID NO: 35033 - DNA, 260 bp, Unknown; identical to SEQ ID NO: 35025
  Description of Unknown: RightRegion for integrase B9034 sequence

SEQ ID NO: 35034 - DNA, 260 bp, Unknown
  Description of Unknown: RightRegion for integrase B9035 sequence
attataaaagagataaaaatatcccccaacgaatttgtggaggatattatatttttttagtttttgttatacagtaactagccgtaaccaccaggttaaggtcagttaccgtataacaaaatatgatagaaataaaggagaagtaattatattatacaagaagaaagaggacgtttcaagcgccctcttttatttttcgcaaaactgaccgatattctcgcggatacattgcttcgatggctttcatgtgttcgtcaagc

SEQ ID NO: 35035 - DNA, 260 bp, Unknown
  Description of Unknown: RightRegion for integrase B9036 sequence
attgtaaaagagataaaaatatcccccaacgaatttgtggaggatattatatttttttagtttttgttatatagtaactagccgcaaccaccgggttaaaacaagttactgtataactaaatattaaaaataaaagagatgcagttacattatacagaataaaagaggacgtttcaaccgccctcttttatttttcgcaaaactgaccgatattcacgcggatacattgcttcgatggctttcatgtgttcgtcaagtac

SEQ ID NO: 35036 - DNA, 260 bp, Unknown
  Description of Unknown: RightRegion for integrase B9037 sequence
cgcaccatcaggagaattgagattgatggtaagaaggtgtctaaggtgttttttatataatttttttattctttttgttgctattatgtcaccttgccacttgtaatagtaacataatagcaacaaatattaaaaaatatcaaaaataccactcaatgagtataagaaagatcattcactttgcactcattgagtgctattatatagacataacaaagaaaggaaccgcagaaagcggtagagtaaaaggaaatgagaaa

SEQ ID NO: 35037 - DNA, 260 bp, Unknown
  Description of Unknown: RightRegion for integrase B9038 sequence
attgtaaaggagataaaaatatcccccaacgaatttgtggaggatattatatttttttagtttttgttatacagtaactagccgtaaccaccgggttaaaaccagttactgtataacaaaatattaaaaataaaggagatgcagttacattatacagaaagaaagaggacgtttcaagcgccctcttttatttttcgcaaaaccgaacgatattcacgcggatacattgcttctatggctttcatgtgttcgtcaagtac

SEQ ID NO: 35038 - DNA, 260 bp, Unknown; identical to SEQ ID NO: 35020
  Description of Unknown: RightRegion for integrase B9039 sequence

SEQ ID NO: 35039 - DNA, 260 bp, Unknown
  Description of Unknown: RightRegion for integrase B9040 sequence
atcgtaaaagaaataaaaatatcccccaacgaatttgtggaggatattatatttttttagtttttgttatacagtaactagccgtaaccaccgggttagaaccagttactgtataacaaaatattaaaaataaaggagatgcacttacattatatagaaagaaagaggacgtttcaagcgccctcttttatttttcgcaaaaccgaacgatattctcgcggatacattgcttcaatggctttcatgtgttcgtcaagcac

SEQ ID NO: 35040 - DNA, 260 bp, Unknown; identical to SEQ ID NO: 35012
  Description of Unknown: RightRegion for integrase B9041 sequence

SEQ ID NO: 35041 - DNA, 260 bp, Unknown
  Description of Unknown: RightRegion for integrase B9042 sequence
attgtaaaagaaataaaaatatcccccgacacttacgtggaggatattatatttttttagtttttgttatacagtaactagccgaaaccaccaggtagcataagtagaaaatttatacccttttctgtagtcaaacttttctaccgctttgatcagtccaagattgccttcctgaatcaaatcaagaaactgcatccccctgccggaataccgcttggcaatacttaccgtaagtcgaagattggcttcggaaagcttct

SEQ ID NO: 35042 - DNA, 260 bp, Unknown; identical to SEQ ID NO: 35028
  Description of Unknown: RightRegion for integrase B9043 sequence

SEQ ID NO: 35043 - DNA, 260 bp, Unknown
  Description of Unknown: RightRegion for integrase B9044 sequence
attgtaaaagaaataaaaatatcccccgacacttacgtggaggatattatatttttttagtttttgttatacagtaactagccgaaaccaccaggttaaggtcagttaccgtataacaaaatatgatagaaataaaggagaagtaattatattatacaagaagaaagaggacgtttcaagcgccctcttttatttttcgcaaaactgaccgatattcacgtgggtacattgcttcgatggctttcatgtgttcgtcaagc

SEQ ID NO: 35044 - DNA, 260 bp, Unknown; identical to SEQ ID NO: 35002
  Description of Unknown: RightRegion for integrase B9045 sequence

SEQ ID NO: 35045 - DNA, 260 bp, Unknown; identical to SEQ ID NO: 35025
  Description of Unknown: RightRegion for integrase B9046 sequence

SEQ ID NO: 35046 - DNA, 260 bp, Unknown
  Description of Unknown: RightRegion for integrase B9047 sequence
attgtaaaagaaataaaaatatcccccgacacttacgtggaggatattatatttttttagtttttgttatacagtaactagccgaaaccaccagattaaagctagttactacataactaaatattaaaaataaaggagatacagttacattatacaagaagaaagaggacgtttcaagcgccctcttttatttttcgcaaaactgaccgatattcacgcgggtacattgcttcgatggctttcatatgttcgtcaagcac

SEQ ID NO: 35047 - DNA, 260 bp, Unknown
  Description of Unknown: RightRegion for integrase B9048 sequence
attgtaaaagaaataaaaatatcccccgacacttacgtggaggatattatatttttttagtttttgttatacagtaactaaccgcaaccaccaggtagcataggtagaaaatttatacccttttctgtagtcaaacttttctaccgctttgatcagtccaagattgccttcctgaatcaaatcaagaaactgcatccccctgccggaataccgcttggcaatacttaccgtaagtcgaagattggcttcggaaagcttct

SEQ ID NO: 35048 - DNA, 260 bp, Unknown
  Description of Unknown: RightRegion for integrase B9049 sequence
attgtaaaagaaataaaaatatcccccgacacttacgtggaggatattatatttttttagtttttgttatacagtaactagccgtaaccaccaggttaaggtcagttactgtataacaaaatatgatagaaataaaggagaggtaattatattatacaagaagaaagaggacgtttcaagcgccctcttttatttttcgcaaaactgaccgatattctcgcggatacattgcttcgatggctttcatgtgttcgtcaagc

SEQ ID NO: 35049 - DNA, 260 bp, Unknown
  Description of Unknown: RightRegion for integrase B9050 sequence
attgtaaaagaaataaaaatatcccccgacacttacgtggaggatattatatttttttagtttttgttatacagtaactagccgtaaccaccaggtagcataggtagaaaatttatacccttttctgtagtcaaacttttctaccgctttgatcagtccaagattgccttcctgaatcaaatcaagaaactgcatccccctgccggaataccgcttggcaatacttaccgtaagtcgaagattggcttcagaaagcttct

SEQ ID NO: 35050 - DNA, 260 bp, Unknown
  Description of Unknown: RightRegion for integrase B9051 sequence
attgtaaaagaaataaaaatatcccccaacgaatttgtggaggatattatatttttttagtttttgttatatagtaactagccgcaaccaccgggttaaaactagttactgtataacaaaatattaaaaataaaggagatacacttacattatacagaaagaaagaggacgtttcaagcgccctcttttatttttcgcaaaactgaccgatattctcgcggatacattgcttctatagctttcatatgttcgtctagcac

SEQ ID NO: 35051 - DNA, 260 bp, Unknown
  Description of Unknown: RightRegion for integrase B9052 sequence
cgcatcattacgcgaatagagatggacgatcagcagaatctcaaagtatttttttcataattcaatttatcctaataatacattaccgacatgtaatgtttatttaggataaaaattctttgagtgccatataaaattacactattctcaaacaatcttcaatgtgcggttctctttacacaataaaaagccgaggaatagtccccggttttttttcattatttcttattttcacattgacatatagtgcactatatgtt

SEQ ID NO: 35052 - DNA, 260 bp, Unknown
  Description of Unknown: RightRegion for integrase B9053 sequence
attgtaaaagaaataaaaatatcccccgacacttacgtggaggatattatatttttttagtttttgttatacagtaactagccgaaaccaccaggtagcataggtagaaaatttatacccttttctgtagtcaaacttttctaccgctttgatcagtccaagattgccttcctgaatcaaatcaagaaactgcatccccctgccggaataccgcttggcaatacttaccgtaagtcgaagattggcttcggaaagcttct

SEQ ID NO: 35053 - DNA, 260 bp, Unknown; identical to SEQ ID NO: 35023
  Description of Unknown: RightRegion for integrase B9054 sequence

SEQ ID NO: 35054 - DNA, 260 bp, Unknown
  Description of Unknown: RightRegion for integrase B9055 sequence
attgtaaaagagataaaaatatcccccaacgaatttgtggaggatattatatttttttagtttttgttatacagtaactagccgtaaccaccgggttaaaaccagttactgtataacaaaatattaaaaataaaggagatacagttacattatacagaaagaaagaggacgtttcaagcgccctcttttatttttcgcaaaaccgaacgatattcacgcggatacattgcttctatggctttcatgtgttcgtcaagtac

SEQ ID NO: 35055 - DNA, 260 bp, Unknown; identical to SEQ ID NO: 35006
  Description of Unknown: RightRegion for integrase B9056 sequence

SEQ ID NO: 35056 - DNA, 260 bp, Unknown
  Description of Unknown: RightRegion for integrase B9057 sequence
attgtaaaagaaataaaaatatcccccaatgagtttgtggaggatattatatttttttagttttagttatatagtaactgaccgcaaccaccgggttaaaacaagttactgtataacaaaatattaaaaataaaagagatacagttacattatacagaataaaagaggacgtttcaaccgccctcttttatttttcgcaaaactgaccgatattcacgcgggtacattgcttctattgctttcatgtgttcatcaagtac

SEQ ID NO: 35057 - DNA, 260 bp, Unknown; identical to SEQ ID NO: 35025
  Description of Unknown: RightRegion for integrase B9058 sequence

SEQ ID NO: 35058 - DNA, 145 bp, Unknown
  Description of Unknown: RightRegion for integrase B9059 sequence
attgtaaaagaaataaaaatatcccccgacacttacgtggaggatattatatttttttagtttttgttatacagtaactagccgtaaccacctgcttcgggtccccttgaaactgctgtctgaactgttgaaactgctgtatcat

SEQ ID NO: 35059 - DNA, 260 bp, Unknown
  Description of Unknown: RightRegion for integrase B9060 sequence
attgtaaaagaaataaaaatatcccccgacacttacgtggaggatattatatttttttagtttttgttatacagtaactagccgtaaccgccaggttaaggtcagttaccgtataacaaaatatgatagaaataaaggagaagtaattatattatacaagaagaaagaggacgtttcaagcgccctcttttatttttcgcaaaactgaccgatattctcgcggatacattgcttctatagctttcatgtgttcgtcaagc

SEQ ID NO: 35060 - DNA, 96 bp, Unknown
  Description of Unknown: RightRegion for integrase B9061 sequence
attgtaaaagaaataaaaatatcccccgacacttacgtggaggatattatatttttttagtttttgttatacagtaactagccgtaaccaccaggt

SEQ ID NO: 35061 - DNA, 260 bp, Unknown
  Description of Unknown: RightRegion for integrase B9062 sequence
attatacgggaaatccctgtgaacaacggcgctgtatcaggcgatccgatttttttataattttccgttgtactttctatgcgtgtgacaccaacgccacgaagaacacggccgccgcgctgccggatgttatccgctggttcaaaaatgcaggctaccgattcgataccgtggaccatctggaaaaaaagccgtaaccgccgccgtcgccccgcctgctgtggacaaaatacggccggaatatgaaaaaaatgcaaatt

SEQ ID NO: 35062 - DNA, 260 bp, Unknown; identical to SEQ ID NO: 35012
  Description of Unknown: RightRegion for integrase B9063 sequence

SEQ ID NO: 35063 - DNA, 260 bp, Unknown
  Description of Unknown: RightRegion for integrase B9064 sequence
acagtagacagaatagaccttgatgaggataatacgccgagaattacctttctttcgtaatttgcagtaatcaaattatccgtcaggttacttattttactatgaataaaaatagacccctcgtaatgaggggtctatctgtttaaaagtatctttttatgaaggcgatccgttcggcgacttcgtcctggtcgcagccatcagcggccgcttcttcaatgacgttttggaaaatcgccgcgatttcatcggtgaagttc

SEQ ID NO: 35064 - DNA, 260 bp, Unknown
  Description of Unknown: RightRegion for integrase B9065 sequence
attgtaaaagaaataaaaatatcccccaacgaatttgtggaggatattatatttttttagtttttgttatgcagtaactagccgtaaccaccatgtagcatatgtcgaaaatttataacctttacgataatcaaacttctctacggctttaattagaccaagatttccttcctgtatcagatcaagaaactgcattcctcttccggaatagcgtttggcaatgcttacggtgaggcgaagattcgcttcagacaatttct

SEQ ID NO: 35065 - DNA, 260 bp, Unknown
  Description of Unknown: RightRegion for integrase B9066 sequence
attgtaaaagaaataaaaatatcccccaacgaatttgtggaggatattatatttttttagttttagttatatagtaactgaccgcaaccaccaggttaaggtcagttaccgtataacaaaatatgatagaaataaaggagaagtaattatattatacaagaagaaagaggacgtttcaagcgccctcttttatttttcgcaaaactgaccgatattcacgtgggtacattgcttcgatggctttcatgtgttcgtcaagc

SEQ ID NO: 35066 - DNA, 133 bp, Unknown
  Description of Unknown: RightRegion for integrase B9067 sequence
accgttgacagaatcgacctcgatgaagatgatacgccgagaattaccttcctttcttaatttgtagtaatagaattagccgtcaggaagcttgggctcgaattgcagatatgccttaccgtttgtatccttt

SEQ ID NO: 35067 - DNA, 260 bp, Unknown
  Description of Unknown: RightRegion for integrase B9068 sequence
attgtaaaagaaataaaaatatcccccaacgaatttgtggaggatattatatttttttagtttttgttatgcagtaactagccgtaaccaccgggttaaaactagttactgtataacaaaatattaaaaataaaggagatacacttacattatacagaaagaaagaggacgtttcaagcgccctcttttatttttcgcaaaactgaccgatattctcgcggatacattgcttctatggctttcatgtgttcgtcaagtac

SEQ ID NO: 35068 - DNA, 260 bp, Unknown
  Description of Unknown: RightRegion for integrase B9069 sequence
attgtaaaagaaataaaaatatcccccaacgaatttgtggaggatattatatttttttagtttttgttatatagtaactagccgcaaccaccaggttaaaactagttactgtataacaaaatattaaaaataaaggagatacacttacattatacagaaagaaagaggacgtttcaagcgccctcttttatttttcgcaaaactgaccgatattctcgcggatacattgcctctatggctttcatatgttcgtctagtac

SEQ ID NO: 35069 - DNA, 260 bp, Unknown
  Description of Unknown: RightRegion for integrase B9070 sequence
attgtaaaagaaataaaaatatcccccgacacttacgtggaggatattatatttttttagtttttgttatacagtaactagccgtaaccaccaggttaaggtcatttaccgtataacaaaatatgatagaaataaaggagaagtaattatattatacaagaagaaagaggacgtttcaagcgccctcttttatttttcgcaaaactgaccgatattctcgcggatacattgcttcgatggctttcatgtgttcgtcaagc

SEQ ID NO: 35070 - DNA, 260 bp, Unknown; identical to SEQ ID NO: 35002
  Description of Unknown: RightRegion for integrase B9071 sequence

SEQ ID NO: 35071 - DNA, 260 bp, Unknown
  Description of Unknown: RightRegion for integrase B9072 sequence
attgtaaaagaaataaaaatatcccccaacgaatttgtggaggatattatatttttttagtttttgttatgcagtaactagccgtaaccaccgggttaaaaccagttactgtataacaaaatattaaaaataaaggagatacagttacattatacagaaagaaagaggacgtttcaagcgccctcttttatttttcgcaaaaccgaacgatattcacgcggatacattgcttctatggctttcatgtgttcgtcaagcac

SEQ ID NO: 35072 - DNA, 260 bp, Unknown; identical to SEQ ID NO: 35052
  Description of Unknown: RightRegion for integrase B9073 sequence

SEQ ID NO: 35073 - DNA, 260 bp, Unknown
  Description of Unknown: RightRegion for integrase B9074 sequence
attgtaaaagaaataaaaatatcccccgacacttacgtggaggatattatatttttttagtttttgttatgcagtaactagccgtaaccaccgggttaaaaccagttactgtataacaaaatattaaaaataaaggagatacacttacattatacagaaagaaagaggacgtttcaagcgccctcttttatttttcgcaaaaccgaacgatattctcgcggatacattgcttctatggctttcatgtgttcgtcaagcac

SEQ ID NO: 35074 - DNA, 260 bp, Unknown; identical to SEQ ID NO: 35035
  Description of Unknown: RightRegion for integrase B9075 sequence

SEQ ID NO: 35075 - DNA, 260 bp, Unknown
  Description of Unknown: RightRegion for integrase B9076 sequence
attgtaaaagaaataaaaatatcccccaacgaatttgtggaggatattatatttttttagttttagttatatagtaactgaccgcaaccaccaggttaaggtcagttaccgtataacaaaatatgatagaaataaaggagaagtaattatattatacaagaagaaagaggacgtttcaagcgccctcttttatttttcgcaaaactgaccggtattctcgcggatacattgcttcgatggctttcatgtgttcgtcaagt

SEQ ID NO: 35076 - DNA, 260 bp, Unknown; identical to SEQ ID NO: 34997
  Description of Unknown: RightRegion for integrase B9077 sequence

SEQ ID NO: 35077 - DNA, 141 bp, Unknown
  Description of Unknown: RightRegion for integrase B9078 sequence
attgtaaaagaaataaaaatatcccccgacacttacgtggaggatattatatttttttagtttttgttatacagtaactagccgtaaccaccaggttaaggtcagttaccgtataacaaaatatgatagaaataaaggaga

SEQ ID NO: 35078 - DNA, 260 bp, Unknown
  Description of Unknown: RightRegion for integrase B9079 sequence
attgtaaaagaaataaaaatatcccccaacgaatttgtggaggatattatatttttttagtttttgttatacagtaactagccgtaaccaccgggttaaaaccagttactgcataacaaaatattaaaaataaaggagatacagttacattatacagaaagaaagaggacgtttcaagcgccctcttttatttttcgcaaaaccgaacgatattctcgcgggtacattgcttctatagctttcatgtgttcgtctagtac

SEQ ID NO: 35079 - DNA, 260 bp, Unknown; identical to SEQ ID NO: 35054
  Description of Unknown: RightRegion for integrase B9080 sequence

SEQ ID NO: 35080 - DNA, 260 bp, Unknown; identical to SEQ ID NO: 35028
  Description of Unknown: RightRegion for integrase B9081 sequence

SEQ ID NO: 35081 - DNA, 260 bp, Unknown
  Description of Unknown: RightRegion for integrase B9082 sequence
attgtaaaagaaataaaaatatcccccgacacttacgtggaggatattatatttttttagtttttgttatacagtaactagccgaaaccaccaggttaaggtcagttaccgtataacaaaatatgatagaaataaaggagaagtaattatattatacaagaagaaagaggacgtttcaagcgccctcttttatttttcgcaaaaccgaacgatattcacgcggatacattgcttctatggctttcatgtgttcgtcaagt

SEQ ID NO: 35082 - DNA, 260 bp, Unknown
  Description of Unknown: RightRegion for integrase B9083 sequence
acagtagatagaatcgacctggatgaagacaacacgccgagaattaccttcctttcctaatttgcagtagtacaactagccgtcaggttagttattttacttcaaataaaaaaagacccctcgttgtgaggggtctatgtcggttatcgtgtgtagtagtcgtcgcctttatgttcggcaaccaccttgccgaatccgtcaatcacttgagttgcgaagttcgttgttccttcttctttatcgacttccaattggttctg

SEQ ID NO: 35083 - DNA, 260 bp, Unknown
  Description of Unknown: RightRegion for integrase B9084 sequence
ataatcagtaagattgaatttgtaaatgattatagattttatattcatttaaaattttagaggtgtaagtatgatattatataaaaagataggtatagataacttaaacaaacttaaccagggaatttattataaagttaaaaagaataagaaagttgcattaaatattatagggaaatatattgatttgaaaagtatagattattcttatgatgattataaattagattatcctgaaagaattgagggatatgctgaat

SEQ ID NO: 35084 - DNA, 260 bp, Unknown
  Description of Unknown: RightRegion for integrase B9085 sequence
attatacgggaaatccccgtgaacaacggcgctgtatcaggcgacccgatttttttataatttgccgttgtactttctacgtgcgtgacaccaacgccacaaagaacacggccgccgcgctgccggacgtcatccgctggttcaaaaacgcaggctaccgctttgacaccgtggatcatttggaaaaaaagatataatccgcctttgtgcatgcctgctgtggacaaaatacggcccgaatatgaaaaaaatgcaaattt

SEQ ID NO: 35085 - DNA, 260 bp, Unknown; identical to SEQ ID NO: 35005
  Description of Unknown: RightRegion for integrase B9086 sequence

SEQ ID NO: 35086 - DNA, 260 bp, Unknown; identical to SEQ ID NO: 35027
  Description of Unknown: RightRegion for integrase B9087 sequence

SEQ ID NO: 35087 - DNA, 260 bp, Unknown; identical to SEQ ID NO: 35023
  Description of Unknown: RightRegion for integrase B9088 sequence

SEQ ID NO: 35088 - DNA, 260 bp, Unknown
  Description of Unknown: RightRegion for integrase B9089 sequence
attgtaaaagaaataaaaatatcccccgacacttacgtggaggatattatatttttttagtttttgttatacagtaactagccgaaaccaccaggttaaggtcagttactgtataacaaaatatgatagaaataaaggagaggtaattatattatacaagaagaaagaggacgtttcaagcgccctcttttatttttcgcaaaactgaccgatattctcgcggatacattgcttcgatggctttcatgtgttcgtcaagc

SEQ ID NO: 35089 - DNA, 260 bp, Unknown
  Description of Unknown: RightRegion for integrase B9090 sequence
acaataattgatcatattgttgtccataaagatgactcactcgatatttttttacgctagtaggcagtaaactacatgtacccatttggatacatttagtttactgctatttatgataaatattactttttgtcatgattttgtaagatttgatcgctacactattaatcaggaggtgataatatggaaatcgaaatcaagcctgaagatctatctttatttttagataagattgggcctaataatattaataggataga

SEQ ID NO: 35090 - DNA, 260 bp, Unknown; identical to SEQ ID NO: 35028
  Description of Unknown: RightRegion for integrase B9091 sequence

SEQ ID NO: 35091 - DNA, 260 bp, Unknown; identical to SEQ ID NO: 35052
  Description of Unknown: RightRegion for integrase B9092 sequence

SEQ ID NO: 35092 - DNA, 260 bp, Unknown
  Description of Unknown: RightRegion for integrase B9093 sequence
attgtaaaagaaataaaaatatcccccaacgaatttgtggaggatattatatttttttagtttttgttatatagtaactagccgtaaccaccaggtagcataggtagaaaatttatacccttttctgtagtcaaacttttctaccgctttgatcagtccaagattgccttcctgaatcaaatcaaggaactgcatccccctgccggaataccgcttggcaatacttaccgtaagtcgaagattggcttcggaaagcttct

SEQ ID NO: 35093 - DNA, 260 bp, Unknown
  Description of Unknown: RightRegion for integrase B9094 sequence
attgtaaaagaaataaaaatatcccccaacgaatttgtggaggatattatatttttttagtttttgttatgcagtaactagccgtaaccaccgggttaaaactagttactgtataacaaaatattaaaaataaaggagatacagttacattatacagaaagaaagaggacgtttcaagcgccctcttttatttttcgcaaaactgaccgatattctcgcgggtacattgcctctatggccttcatgtgttcgtctagtac

SEQ ID NO: 35094 - DNA, 260 bp, Unknown
  Description of Unknown: RightRegion for integrase B9095 sequence
attataaaagaaataaaaatatcccccgacacttacgtggaggatattatatttttttagtttttgttatacagtaactagccgtaaccaccaggttaaggtcagttaccgtataacaaaatatgatagaaataaaggagaagtaattatattatacaagaagaaagaggacgtttcaagcgccctcttttatttttcgcaaaactgaccgatattctcgcggatacattgcttcgatggctttcatgtgttcgtcaagc

SEQ ID NO: 35095 - DNA, 260 bp, Unknown
  Description of Unknown: RightRegion for integrase B9096 sequence
attgtaaaagaaataaaaatatcccccgacacttacgtggaggatattatatttttttagtttttgttatacagtaactagccgtaaccaccagattaaagctagttactacataactaaatattaaaaataaaggagatacagttacattatacaagaagaaagaggacgtttcaagcgccctcttttatttttcgcaaaactgaccgatattcacgcgggtacattgcttcgatggctttcatgtgttcgtcaagcac

SEQ ID NO: 35096 - DNA, 260 bp, Unknown
  Description of Unknown: RightRegion for integrase B9097 sequence
attgtaaaagaaataaaaatatcccccgacacttacgtggaggatattatatttttttagtttttgttatacagtaactagccgaaaccaccaggttaaggtcagttaccgtataacaaaatatgatagaaataaaggagaagtaattatattatacaagaagaaagaggacgtttcaagcgccctcttttatttttcgcaaaactgaccgatattctcgcggatacattgcttcgatggctttcatgtgttcgtcaagt

SEQ ID NO: 35097 - DNA, 260 bp, Unknown
  Description of Unknown: RightRegion for integrase B9098 sequence
attgtaaaagaaataaaaatatcccccaacgaatttgtggaggatattatatttttttagtttttgttatgcagtaactagccgtaaccaccgggttaaaaccagttactgtataacaaaatattaaaaataaaggagatacacttacattatacagaaagaaagaggacgtttcaagcgccctcttttatttttcgcaaaactgaacgatattctcgtgggtacattgcttctatggctttcatatgttcgtcaagcac

SEQ ID NO: 35098 - DNA, 260 bp, Unknown
  Description of Unknown: RightRegion for integrase B9099 sequence
attgtaaaagaaataaaaatatcccccaacgaatttgtggaggatattatatttttttagtttttcttatacagtaactagccgtaaccaccgggttaaaaccagttactgtataacaaaatattaaaaaataaaggagatacagttacattatacagaaagaaagaggacgtttcaagcgccctcttttatttttcgcaaaaccgaacgatattctcgcggatacattgcttctatggctttcatgtgttcgtcaagta

SEQ ID NO: 35099 - DNA, 260 bp, Unknown
  Description of Unknown: RightRegion for integrase B9100 sequence
attgtcaaagaaatcaaaatataccctgataggcacatagaatattccttaaatgtttgaaaaatttttaatgaattttattacttaatatttctccctctgtagttgcgataatattatgtaataaaatccccgccctcataagagagcggggactatcatcagtgcttcacgacaaactcatagtaccgagcgagtttgtccggagcggcgtcctggtcgtccagaaacgctttcgcaatttcggcatagaagtcgat

SEQ ID NO: 35100 - DNA, 260 bp, Unknown
  Description of Unknown: RightRegion for integrase B9101 sequence
cgtaccatcaggcgcattgagattgatggtaagaaggtgtctaaggtattttttctataattttttatcctttctgttgctattatgtcaccttgccacttgtaatagtaacataatagcaactagttaaataatatcaataaaaacaccgatttggtgcaaatatatgctttgcaaagtaccgaatcggtgctatactatagtcatagcaaagaaaggagctaccaaaggtagtaaggtaaaggaaaatgaagagagaa

SEQ ID NO: 35101 - DNA, 260 bp, Unknown
  Description of Unknown: RightRegion for integrase B9102 sequence
actgtagatagaatagacattgatgaagacgatagaccgagaattacatttatttcttaattcgtagtagattaactatccgtcaggaagcttgggctcgaattgcagatatgccttaccgtttgtatcctttgtagccaaagcggccaccgtttcgggatatttccctttatcgatttcatacaatgccgccgcattatcaatcgtccggatatccgcactgatttttgctattttcgccgtctttccggcagacataa

SEQ ID NO: 35102 - DNA, 260 bp, Unknown; identical to SEQ ID NO: 35028
  Description of Unknown: RightRegion for integrase B9103 sequence

SEQ ID NO: 35103 - DNA, 260 bp, Unknown
  Description of Unknown: RightRegion for integrase B9104 sequence
attgtaaaagagataaaaatatcccccaacgaatttgtggaggatattatatttttttagtttttgttatatagtaactagccgtaaccaccaggtagcataggtagaaaatttatacccttttctgtagtcaaacttttctaccgctttgatcagtccaagattgccttcctgaatcaaatcaagaaactgcatccccctgccggaataccgcttggcaatacttaccgtaagtcgaagattggcttcggaaagcttct

SEQ ID NO: 35104 - DNA, 260 bp, Unknown
  Description of Unknown: RightRegion for integrase B9105 sequence
attgtaaaagaaataaaaatatcccccgacgaatttgtggaggatattatatttttttagtttttgttatgcagtaactagccgtaaccaccgggttaaaaccagttactgtataacaaaatattaaaaataaaggagatacagttagattatacagaataaaagaggacgtttcaagcgccctcttttatttttcgcaaaaccgaacgatattctcgtgggtacattgcttctatggctttcatatgttcgtcaagcac

SEQ ID NO: 35105 - DNA, 260 bp, Unknown
  Description of Unknown: RightRegion for integrase B9106 sequence
attgtaaaagaaataaaaatatcccccaacgaatttgtggaggatattatatttttttagtttttgttatgcagtaactagccgtaaccaccgggttaaaaccagttactgtataacaaaatattaaaaaataaaggagatacagttacattatacagaaagaaagaggacgtttcaagcgccctcttttatttttcgcaaaaccgaacgatattctcgcggatacattgcttctatggctttcatgtgttcgtcaagta

SEQ ID NO: 35106 - DNA, 260 bp, Unknown; identical to SEQ ID NO: 35103
  Description of Unknown: RightRegion for integrase B9107 sequence

SEQ ID NO: 35107 - DNA, 260 bp, Unknown
  Description of Unknown: RightRegion for integrase B9108 sequence
tgcatagacaagatcgtgattactgacggaaatatagacatctattttaatttgctatgatttccctttcctataatcgttccgatgatcattggagaaatccggaggttcatccgggacaataattcgatccgtgttagcaggtcacttcgtgatacggcatataaagccatttacgcgaaagaaaattatgtcaaagtaaaccagaaagaacctactgttcaggaaattgcagaggaaatcgggatcgcaaaggaaga

SEQ ID NO: 35108 - DNA, 260 bp, Unknown; identical to SEQ ID NO: 35054
  Description of Unknown: RightRegion for integrase B9109 sequence

SEQ ID NO: 35109 - DNA, 260 bp, Unknown
  Description of Unknown: RightRegion for integrase B9110 sequence
attatacgggaaatccccgtgaacaacggcgctgtatcaggcgacccgatttttttataattttccgttgtactttctatgtgcgtgacaccaacgccacgaagaacacggccgccgcgctgccggacgttatccgctggttcaaaaatgcaggctaccgattcgataccgtggaccatctgaaaaaaaagccgtaaccgccgccgccacccgcctgctgtggacaaaatacggccggaatatgaaaaaatgcaaatttt

SEQ ID NO: 35110 - DNA, 260 bp, Unknown
  Description of Unknown: RightRegion for integrase B9111 sequence
agagttgtgaggagaatcgagatcaagcgtcactcagtcgacaaggtgtactttgtttaaatttttgtgcaatttttttgtacttactttttgctattatgtcaccttgtcagatgtcatggtaacataatagcaataaaatattaaataatatcaatatatcacacaatacatgatatatttatcgctatacaagtcatacattgtatgatattatatagacataacaaagaaaggaaaccacaaagagtggttaaggt

SEQ ID NO: 35111 - DNA, 260 bp, Unknown
  Description of Unknown: RightRegion for integrase B9112 sequence
cgaaatgtccttgattctgtccacgtttcccctgatggaatagaagtcttcttcaagtaaaaagcagacatttctgtctgcaatttactaggagaatttcatgcccaatgtcaacaaagcccatctataatatacatcaatcaatcaccgaatgcaaacggtgattttttctttactaacatacgctgacctgtaggctatgacaagttagtatagaattttgcaaataaaaaaaaccaccttttcggtgatcttattca

SEQ ID NO: 35112 - DNA, 260 bp, Unknown
  Description of Unknown: RightRegion for integrase B9113 sequence
cgaaatgttcttgattctgtccatgtttcacctgatggaatagaagttttcttcaagtaaaaagcagacatttctgcctgccgattactaggagaatttcatgcccaaatgtcaactaaaccctacgcctataatatacaccaatcaatcacctaatgcaaacggtgattttttctttactaacatatgctaacctgtaggctatgacaagttagtatagaaatttgcaaataaaaaaaagcagatgcttcgcatccacc

SEQ ID NO: 35113 - DNA, 260 bp, Unknown
  Description of Unknown: RightRegion for integrase B9114 sequence
cgcaatgtccttgattctgtacatgtttcccctgatggaatagaagtttttttcaagtaaaaagcagacatttctgcctgccgtttactaggagaatttcatgcccaaatgtcaactaaaccctacgcctataatatacaccaatatatcaccgaatgcaaacggtgattttttctttactaacatattctaacctgtaggctatgacaagttagtatagaattttgcaaataaaaaaacagcccaccgaaaactccgac

SEQ ID NO: 35114 - DNA, 260 bp, Unknown
  Description of Unknown: RightRegion for integrase B9115 sequence
cgaaatgtccttgattctgtccatgtttcacctgacaaaataaaagttttcttcaagtaaaaagcagacattcctgcctgccgtttactaggagaatttcatgcccaaatgtcaactaaaccctacgcctataatatacaccaaacaatcaccgaatgcaaacggtgatttttttcttcactaacattatgtaacctgtaggctatgacaagttagtatagaattttgcataaaaaaaaacagcccgccgaatacccccg

SEQ ID NO: 35115 - DNA, 260 bp, Unknown
  Description of Unknown: RightRegion for integrase B9116 sequence
cgcaatgttcttgattctgtccacgtttcacctgacaaaatagaagttttcttcaagtaaaaagcagacatttctgtctgccctttactaggagaattttatgatcaatgtaaacgaaagtacatctataatatacaccaatcaatcaccgaatgcaaacggtgattttttctttactaagatatactaacctgtaggctatgacaagttagtatagaattttgcaaataaaaaaacagcccgccgaaaaccgacaggct

SEQ ID NO: 35116 - DNA, 260 bp, Unknown
  Description of Unknown: RightRegion for integrase B9117 sequence
cgaaatgttcttgattctgtccatgtttcacctgacaaaatagaagtttttttcaagtaaaaagcagacatttctgtctgccatttactaggagaatttcatgcccaatgtcaacaaaaccacacctataatatacatcaatcaatcaccaaatgcaaacggtgatttttttctttactaacattatgtggcctgtaggctatgacaagttagtatagaattttgcaaataaaaaaaaccacctttcggtgatcttattc

SEQ ID NO: 35117 - DNA, 260 bp, Unknown
  Description of Unknown: RightRegion for integrase B9118 sequence
cgaaatgtccttgattcagtccatgtttcccctgatggaatagaaatttttttcaagtaaaaagcagacatttctgtctgcaatttactaggagaatttcatgccctaatgtcaacaaagcccatctataatatacatcaatcaatcaccgaatgcaaacggtgatttttttctttactaacatggtttgacctgtaggttatggtaagttagtatagaattttatgcataaaaaaacagcccgtcgaatacccccgaca

SEQ ID NO: 35118 - DNA, 260 bp, Unknown
  Description of Unknown: RightRegion for integrase B9119 sequence
attataaaagagataaaaatatcccccaacgaatttgtggaggatattatatttttttagtttttgttatgcagtaactagccgtaaccaccaggttaaggtcagttaccgtataacaaaatatgatagaaataaaggagaagtaattatattatacaagaagaaagaggacgtttcaagcgccctcttttatttttcgcaaaactgaccgatattctcgcggatacattgcttcgatggctttcatgtgttcgtcaagc

SEQ ID NO: 35119 - DNA, 260 bp, Unknown
  Description of Unknown: RightRegion for integrase B9120 sequence
attataaaagagataaaaatatcccccaacgaatttgtggaggatattatatttttttagtttttgttatgcagtaactagccgtaaccaccaggtagcataggtagaaaatttatacccttttctgtagtcaaacttttctaccgctttgatcagtccaagattgccttcctgaatcaaatcaagaaactgcatccccctgccggaataccgcttggcaatacttaccgtaagtcgaagattggcttcagaaagcttct

SEQ ID NO: 35120 - DNA, 260 bp, Unknown
  Description of Unknown: RightRegion for integrase B9121 sequence
cgaaatgtccttgattctgtcaacgtttcccctgatggaatagaagttttcttcaagtaaaaagcaggcatttctgcctgccctttactaggagaaatatatgtacaaatagtaaccagacccatctacaatatacatcaatcaatcaccgaatgcaaacggtgattttttctttactaacatacgccgacctgtaggctatgacaagttagtatagaattttatgcataaaaaatcagcccgcaggaacccctgacagg

SEQ ID NO: 35121 - DNA, 260 bp, Unknown
  Description of Unknown: RightRegion for integrase B9122 sequence
cgcaatgttcttgattctgtccatgtttcacctgatggaatagaagttttcttcaagtaaaaagcagacatttctgcctgccgtttactaggagaatttcatgcccaatgtcaacaaaaccacacctataatatacatcaatcaatcaccgaatgcaaacggtgatttttttctttactaacattatgtgacctgtaggctatgacaagttagtatagaattttttgcataaaaaaacagcccgccgaaaacctccgaca

SEQ ID NO: 35122 - DNA, 260 bp, Unknown
  Description of Unknown: RightRegion for integrase B9123 sequence
agagtcgtgaggaaaatcgagatcaagcgccactcagtcgacaaggtgtactttgtttaaatttttgtgcaatttttttgtacttactttttgctattatgtcaccttgtcagatgtcatggtaacataatagcaataaaatattaaataatatcaatatatcacacaatgcatgatatatttatcactatacaagtcatacattgtatgatattatatagacataacaaagaaaggaaaccacaaagagtggttaaggt

SEQ ID NO: 35123 - DNA, 260 bp, Unknown
  Description of Unknown: RightRegion for integrase B9124 sequence
agaaatgttcttgattctgtcaacgtttcacctgatggaatagaagttttcttcaagtaaaaagcagacatttctgcctgccgattactaggagaatttcatgcccaaatgtcaactaaaccctacgcctataatataccccaagcaatcaccgaatgcaaacggtgattttttctttactaacataggctaacctgtaggctatgacaagttagtatagaattttgcaaataaaaaaacattgcatactaccaatacgc

SEQ ID NO: 35124 - DNA, 260 bp, Unknown
  Description of Unknown: RightRegion for integrase B9125 sequence
cgcaatgtccttgattctgtccatgtttcacctgacaaaatagaagttttcttcaagtaaaaagcagacatttctgcctgccctttactaggagaatttatgaccaatttcaacgaaattacatctataatatacatcaatcaatcaccgaatgcaacggtgattttttctttactaacatatactaacctgtaggctatgacaagttagtatagaattttgcaaataaaaaaaacagcccgccgaatacctccgacaag

SEQ ID NO: 35125 - DNA, 260 bp, Unknown
  Description of Unknown: RightRegion for integrase B9126 sequence
cgaaatgttcttgattctgtccatgtttcacctgatggaatagaagttttcttcaagtaaaaagcagacatttctgcctgccgattactaggagaatttcatgcccaaatgtcaactaaaccctacgcctataatatacaccaatcaatcacctaatgcaaacggtgatttttttctgtactaacattatgtgacctgtaggctatgacaagttagtatagaaatttgcaaataaaaaaaagcagatgcttcgcatccac

SEQ ID NO: 35126 - DNA, 260 bp, Unknown
  Description of Unknown: RightRegion for integrase B9127 sequence
cgcaatgttcttgagtctgtacatgtttcacctgacaaaatagaagttttcttcaagtaaaaagcagacatttctgcctgccctttactaggagaattataccaatgaaaaaatacatctataatatactccaatcaatcaccgaatgcaaacggtgattttttctttactaacattatgcgacctgtaggctatgacaagttagtatagaattttgcaaataaaaaaacagcccgccgaaaaccgacaggctgagaaag

SEQ ID NO: 35127 - DNA, 260 bp, Unknown
  Description of Unknown: RightRegion for integrase B9128 sequence
agagttgtgaggagaatcgagatcaagcgtcactcagtcgacaaggtgtactttgtttaaatttttgtgcaatttttttgtacttactttttgctattatgtcaccttatcacttgtcatggtaacataatagcaaaaaatatcaataaaaagcactgatttagtgcaaatatatactttacaaagcactgaatcggtgctatactatagtcatagcaaagaaaggaactgccaaatgtagtaaggtaaagagaaatgaa

SEQ ID NO: 35128 - DNA, 260 bp, Unknown
  Description of Unknown: RightRegion for integrase B9129 sequence
ggaatacttgattgtattactgtagatagtcagaatagaatccaaatattctatcgataattttttatttacattaatatatccccttgaatattaactttaagtctagtatttttcactaattatgttacaatagatagcaacaaaaacatcgaaatcttttttaaataacattgtattatctccacttccactgtcgcagtcttcggaacaattataacactatataccaatttcaactccacggagcaagataaata

SEQ ID NO: 35129 - DNA, 260 bp, Unknown
  Description of Unknown: RightRegion for integrase B9130 sequence
cgcaatgttcttgattctgtccacgtttcacctgacaaaatagaagttttcttcaagtaaaaagcagacatttctgcctgctctttactaggagaatttatgaccaatgtcaacgaaaatacatctataatatacaccaataagtcaccgaatgcaaacggtgattttttctttactaagatatgctaacctgtaggatatgacaagttagtatagaatttttcaaataaaaaaacagcccgccgaaaaccgacaggctg

SEQ ID NO: 35130 - DNA, 260 bp, Unknown; identical to SEQ ID NO: 35118
  Description of Unknown: RightRegion for integrase B9131 sequence

SEQ ID NO: 35131 - DNA, 260 bp, Unknown
  Description of Unknown: RightRegion for integrase B9132 sequence
cgcaacatccttgattctgtacatgtttcacctgatggaatagaagtttttttcaagtaaaaagcagacatttctgcctgccatttactagaagaacgatatatacagatttcaatcaaactgcatctataatatacaccaatcaatcaccgaatgcaaacggtgattttttctttactaacattatgtaacctgtaggctatggcaagttagtatagaattttgcataaaaaaatcagcccgccgaaatgacacgacag

SEQ ID NO: 35132 - DNA, 260 bp, Unknown
  Description of Unknown: RightRegion for integrase B9133 sequence
ttaaaaaaaatctccatcgaggatgatggagagataaattttaccgtcagtgtaccataatttactgttagggtgctcatagtaaaatatagtataatgcataattcgataaggtgactacaaaacgtagtcaccttatcacttactcaactattgcgtggtagtagttggccagcttctcagttggcccgcctccatcccggtcaaacaaaaaggctttcgccatttcgccgtaaaaatccggtttgctacatccgctt

SEQ ID NO: 35133 - DNA, 260 bp, Unknown
  Description of Unknown: RightRegion for integrase B9134 sequence
cgaaatgttcttgattctgtccatgtttcacctgacaaaatagaagttttcttcaagtaaaaagcagacatttctgcctgccctttactaggagaatttatgaccaatgtcaacgaaaatacatctataatatacaccaataagtcaccgaatgcaaacggtgattttttctttactaacattatgtgacctgtaggatataacaagttagtatagaattttgcaaataaaaaaacagcccgtcgaaaacctacgacagg

SEQ ID NO: 35134 - DNA, 260 bp, Unknown
  Description of Unknown: RightRegion for integrase B9135 sequence
cgcaatgtccttgattctgtccatgtttcacctgatggaatagaaatttttttcaagtaaaaagcagacatttctgcctgccatttactaggagaatttcatgccataatgtcaactaaaccctacgcctataatatacatcaatcaatcaccgaatgcaaacggtgattttttttcttcactaacattatgtaacctgtaggctatgacaagttagtatagaattttttgcataaaaaagcagcccgccgaatactccc

SEQ ID NO: 35135 - DNA, 260 bp, Unknown; identical to SEQ ID NO: 35123
  Description of Unknown: RightRegion for integrase B9136 sequence

SEQ ID NO: 35136 - DNA, 260 bp, Unknown
  Description of Unknown: RightRegion for integrase B9137 sequence
agagttgtgaggagaatcgagatcaagcgtcactcagtcgacaaggtgtactttgtttaaatttttgtgcaatttttttgtgcttactttttgctattatgtcaccttgccactatttatcgtatacccaaataacgaatatatcgtatccatcttgccgcggctccacgcaacctcaatagcatgacgcagggcacgctctacacggcttggtgttgttatatatttcttagcgattgacggatacaatgcctttgtga

SEQ ID NO: 35137 - DNA, 260 bp, Unknown
  Description of Unknown: RightRegion for integrase B9138 sequence
cgaaatgtccttgattctgtccacgtttcccctgatggaatagaagtcttcttcaagtaaaaagcagacatttctgtctgcaatttactaggagaatttcatgcccaatgtcaacaaagcccatctataatatacatcaatcaatcaccgaatgcaaacggtgattttttctttactaacatgcgctgacctgtaggctatgacaagttagtatagaattttttgcataaaaaaacagcccgccgaatacccccgacaag

SEQ ID NO: 35138 - DNA, 260 bp, Unknown
  Description of Unknown: RightRegion for integrase B9139 sequence
cgaaatgtacttgattctgttcacgtttcccctgatggaatagaagttttcttcaaataaaaagcagacatttctgcctgccctttaatagaagaacgatatacagatatcaaattctgcacctataatatacaccaatcaatcaccgaatgcaaacggtgattttttctttactaacattatgtggcctgtaggctatgacaagttagtatagaattttacgcataaaaaaagcccgccgaacactccgacaggctaaa

SEQ ID NO: 35139 - DNA, 260 bp, Unknown
  Description of Unknown: RightRegion for integrase B9140 sequence
atctctgagattagattagtaaataattttagatgtgttgtgataaccactatcttctaaggagcaactatgattttatatgaaaagattttagataggtattcaagaacagagttaaataaaatattagatcctagattagcaaggaaaatatactacaataggggaattattccccttggaaaaatatctaaattaatctcttttgatgaaattggttataatgttgaagatgcagttattgattattctttagataa

SEQ ID NO: 35140 - DNA, 260 bp, Unknown
  Description of Unknown: RightRegion for integrase B9141 sequence
cgaaatgttcttgattctgtccatgtttcacctgatggaatagaagttttcttcaagtaaaaagcagacatttctgtctgccatttactaggagaatttcatgccataatgtcaactaaacccacctataatatacatcaatcaatcaccgaatgcaaacggtgatttttttctttactaacattatgtgacctgtaggctatgacaagttagtatagaattttgcataaaaaaaaaacagcccgccgaatacccccgac

SEQ ID NO: 35141 - DNA, 260 bp, Unknown
  Description of Unknown: RightRegion for integrase B9142 sequence
cgaaatgtccttgattctgtccacgtttcacctgatggaatagaagtttttttcaagtaaaaagcagacatttctgcctgccgattactaggagaatttcatgcccaaatgtcaactaaaccctacgcctataatatacaccaatatatcaccgaatgcaaacggtgatatttttctgtactaacatacgctaacctgtaggctatgacaagttagtatagaatttcacgcataaaaaaacagcccgccgaatacccccg

SEQ ID NO: 35142 - DNA, 260 bp, Unknown
  Description of Unknown: RightRegion for integrase B9143 sequence
agagttgtgaggagaatcgagatcaagcgtcactcagtcgacaaggtgtactttgtttaaatttttgtgcaatttttttgtacttgctttttgctattatgtcaccttgtcacttgtaatagtaacataatagcaaaaaattaaataatatcaataaaaacaccgatttggtgcaaatatatgctttacaaagtaccgaatcggtgctatattatagtcataacaaagaaaggaactaccaaaggtagtaaggtaaagga

SEQ ID NO: 35143 - DNA, 260 bp, Unknown
  Description of Unknown: RightRegion for integrase B9144 sequence
cgcaatgttcttgagtctgtccacgtttctcctgatggaatagaagttttcttcaagtaaaaagcagacatttctgcctgccctttactaggagaatttattaccaagaaattacatctataatatacaccaatcaatcaccgaatgcaaccggtgattttttctttactaagatatgctaacctgtaggctataacaagttagtatagaattttatgcataaaaaagcagcacgccgaaaacctccgacatgctgagaa

SEQ ID NO: 35144 - DNA, 260 bp, Unknown
  Description of Unknown: RightRegion for integrase B9145 sequence
cgcaacatccttgattctgtccatgtttcccctgatggaatagaagtttttttcaagtaaaaagcagacatttctgtctgccatttactaggagaatttcatgcccaaatgtcaactaaaccctacgcctataatatacaccaatcaatcacctaatgcaaacggtgattttttttctttactaacattgtatgacctgtaggctgtgacaagttagtatagaattttgcaaataaaaaaagcagatgctccgcatctac

SEQ ID NO: 35145 - DNA, 260 bp, Unknown
  Description of Unknown: RightRegion for integrase B9146 sequence
cgcaatgtccttgattctgtcaacgtttcacctgatggaatagaagttttcttcaaataaaaagcagacatttctgcctgccctttaatagaagaacgttatacagatatcaaattctgcatctataatatacaccaatcaatcaccgaatgcaaacggtgattttttctttactaacatatgcttacctgtaggctatgacaagttagtatagaaattcatgcataaaaaaatcagcccgccgaaacccccgacaggct

SEQ ID NO: 35146 - DNA, 260 bp, Unknown
  Description of Unknown: RightRegion for integrase B9147 sequence
gaaaagcgtaaacaggcaggtcagatttcaaaagagaggagatggcacagatgcccgtagtaaccaaaattccagcaaggctgcaccctgcgacctttgtacctcttgaaagcacagcaaaacgcaaggttgccggctatgcgagagtgtcgaccgattcggaggagcagcagacttcctacgcagcacaggtcagctattacacggattacattcagaaacgcctcgattgggattttgttggagtgtacacggatgag

SEQ ID NO: 35147 - DNA, 260 bp, Unknown
  Description of Unknown: RightRegion for integrase B9148 sequence
cgcaatgttcttgattctgtccacgtttctcctgacggaatagaagttttcttcaagtaaaaagcagacatttctgtctgccctttactaggagaatttatgtgccaatgtcaacgaaaatacatctataatatacaccaatcaatcaccgaatgcaaacggtgattttttctttactaagatatgctaacctgtaggctatgacaagttagtatagaatttttcaaataaaaaaacagcccgctgaaaacctccgacag

SEQ ID NO: 35148 - DNA, 260 bp, Unknown
  Description of Unknown: RightRegion for integrase B9149 sequence
cgcaatgttcttgattctgtccatgtttctcctgatggaatagaagttttcttcaagtaaaaagcagacatttctgtctgccctttactaggagaatttatgaccaatgtaaacgaaagtacatctataatatacaccagaaaatcgccgaatgcaaacggtgattttttctttactaagatattctagcctgtaggctatgataagttagtatagaattttgaaaataaaaaaacagcccgccgaaaaccgacaggctg

SEQ ID NO: 35149 - DNA, 260 bp, Unknown
  Description of Unknown: RightRegion for integrase B9150 sequence
cgaaatgttcttgattctgttcacgtttcccctgatggaatagaagttttcttcaagtaaaaaacaggcatttctgcctgccctttaatagaagaacgttatacagatatcaaattctgcacctataatatacaccaatcaatcaccgaatgcaaacggtgattttttctttactaacattatgtgacctgtaggctaacgcaagttagtatagaaatttatgcataaaaaaatcagcccaccgaaacgacacgacaggc

SEQ ID NO: 35150 - DNA, 260 bp, Unknown
  Description of Unknown: RightRegion for integrase B9151 sequence
cgaaatgtccttgattctgtccacgttttccctgataaaatagaagttttcttcaagtaaaaagcagacatttctgtctgccatttacaaggagaatttcatgtcctagtgccaacaaagctacatctataatatacaccaatcaatcaccgaatgcaaacggtgattttttctttactaacatgatgtgacctgtaggctatgacaagttagtatagaattttgcataaaaaaaacagcctgccgaaaacatccgacaa

SEQ ID NO: 35151 - DNA, 260 bp, Unknown
  Description of Unknown: RightRegion for integrase B9152 sequence
cgcaatgttcttgattctgtccacgtttcacctgatggaatagaagtttttttcaagtaaaaagcagacatttctgcctgccctttactaggagaatttatgaccaatgtaagccacatctataatatacaccaatcaatcaccgaatgcaaacggtgattttttctatactaacattatgtgacctgtaggctatgacaagttagtatagaattttgcaaataaaaaaacagcccgccgaatacctccgacaggctgag

SEQ ID NO: 35152 - DNA, 260 bp, Unknown
  Description of Unknown: RightRegion for integrase B9153 sequence
cgcaatgttcttgattctgtccatgtttcacctgacaaaatagaagttttctttaagtaaaaagcagacatttctgcctgccctttactaggagaatttatgaccaatgtcaacgaaaatacatctataatatacaccaataagtcaccgaatgcaaacggtgattttttctttactaagatatgctaacctgtaggctatgacaagttagtatagaatttttcaaataaaaaaacagcccgccgaaagcttcgacaggc

SEQ ID NO: 35153 - DNA, 260 bp, Unknown
  Description of Unknown: RightRegion for integrase B9154 sequence
cgcaacatccttgattctgtccatgtttcccctgatgggatagaagttttcttcaagtaaaaagcagacatttctgcctgccgattactaggagaatttcatgcctaaatgtcaactaaaccctacgcctataatatacaccaatcaatcacctaatgcaaacggtgatttttttctgtactaacatggtatgacctgtaggctatgacaagttagtatagaatttcatgcataaaaaaaacagcccgccgaataccccc

SEQ ID NO: 35154 - DNA, 260 bp, Unknown
  Description of Unknown: RightRegion for integrase B9155 sequence
cgaaatgtacttgattcagtccatgtttcacctgatggaatagaagttttcttcaaataaaaagcagacatttctgcctgccaactaaacccacctataatatacatcaatcaatcaccgaatgcaaacggtgattttttctttactaagatatactgacctgtaggctatgacaagttagtatagaattttgcatgaaaaaatcagcccgccgaaacgacacgacaggctgagaaaggaattttgtgatgaacatgaaa

SEQ ID NO: 35155 - DNA, 260 bp, Unknown
  Description of Unknown: RightRegion for integrase B9156 sequence
cgcaatgttcttgattccgtccatgtttcccctgacaaaatagaagttttcttcaaataaaaagcagacatttctgcctgccctttaatagaaggacgttatacagatatcaaattctgcacctataatatacgccaatcaatcaccgtttgcaaacggtgtttttttctttactaacattatgtgacctgtaggctatgacaagttagtatagaaattcatgcataaaaaaatcagcccgccgaaacgacacgacaggc

SEQ ID NO: 35156 - DNA, 260 bp, Unknown
  Description of Unknown: RightRegion for integrase B9157 sequence
cgcaacatccttgattctgtccatgtttcacctgatggaatagaagtttttttcaagtaaaaagcagacatttctgtctgccatttactaggagaatttcatgcccaaatgtcaactaaaccctacgcctataatatacaccaatcaatcacctaatgcaaacggtgatttttttctatactaacattatgtaacctgtaggctatgacaagttagtatagaattttgcgaataaaaaaaacagcctgccgaatacctcc

SEQ ID NO: 35157 - DNA, 260 bp, Unknown
  Description of Unknown: RightRegion for integrase B9158 sequence
cgcaatgtccttgagtctgtccatgtttcacctgatggaatagaagttttcttcaagtaaaaagcagacatttctgcctgccctttactaggagaattatatgtaccaatgaaaaaatacatctataatatactccaatcaatcaccgaatgcaagcggtgatttttttctttactaagatatgctaacctgtaggctatgacaagttagtatagaattttgcaaataaaaaaacagcccgccgaaaaccgacagactga

SEQ ID NO: 35158 - DNA, 260 bp, Unknown
  Description of Unknown: RightRegion for integrase B9159 sequence
cgcaatgttcttgattctgtccacgtttcacctgacaaaatagaagttttcttcaagtaaaaagcagacatttctgcctgccctttactaggagaatttatgaccaatgtaagccacatctataatatacatcaatcaatcaccgaatgcaaacggtgattttttctttactaagatatgctaacctgtaggctataacaagttagtatagaatttttcaaataaaaaaacagcccgccgaaaactccgacaggctgaga

SEQ ID NO: 35159 - DNA, 260 bp, Unknown
  Description of Unknown: RightRegion for integrase B9160 sequence
cgcaatgttcttgattctgtccacgtttcacctgacaaaatagaagttttcttcaagtaaaaagcagacatttctgtctgccctttactaggagaattttatgatcaatgtaaacgaaagtacatatataatatacaccaatcaatcaccgaatgcaaacggtgattttttctttactaagatatactaacctgtaggctatgacaagttagtatagaattttgcaaataaaaaaacagcccgccgaaaaccgacaggct

SEQ ID NO: 35160 - DNA, 260 bp, Unknown
  Description of Unknown: RightRegion for integrase B9161 sequence
aggtcactaaaactttataaaaagagaggagaggatggaagatggctaaaagaaaaataacggttattccttcaacaataaatcctttaacgcagaccccggttggtagcgttcaaaaaagaaaagttgcagcgtatgctcgtgtctcaactgatagcgatgagcaatatacctcttacgaaacacaaaaaacatattatgaaaattacataaaaagtaaacctgagtgggaatttgtaagagtatatgctgatgaagga

SEQ ID NO: 35161 - DNA, 260 bp, Unknown
  Description of Unknown: RightRegion for integrase B9162 sequence
cgaaatgtccttgattctgtccacgtttcccctgatgggatagaagttttcttcaagtaaaaagcagacatttctgcctgccgtttactaggagaatttcatacccaatgtcaacaaagcccatctataatatacatcaatcaatcaccgaatgcaaacggtgattttttctttactaacatgcgctgacctgtaggctatgacaagttagtatagaattttttgcataaaaaaacagcccgccgaatacccccaacaag

SEQ ID NO: 35162 - DNA, 260 bp, Unknown
  Description of Unknown: RightRegion for integrase B9163 sequence
agagttgtgaggagaatcgagatcaagcgtcactcagtcgacaaggtgtactttgtttaaatttttgtgcaatttttttgtacttactttttgctattatgtcaccttgtcacttgtcatggtaacataatagcaaaaaatatcaataaaaagcactgatttagtgcaaatatatactttacaaagcactgaatcggtgctatactatagtcatagcaaagaaaggaactgccaaatgtagtaaggtaaagagaaatgaa

SEQ ID NO: 35163 - DNA, 260 bp, Unknown
  Description of Unknown: RightRegion for integrase B9164 sequence
agagttgtgaggagaatcgagatcaagcgtcactcagtcgacaaggtgtacttcgtttaaatttttgtgcaatttttttgcacttactttttgctattatgtcaccttgtcagaatttatcgtataaccgaataacgaatatatcgtatccatcttgccgcggctccacgcaacctcaatcgcatgacgcagggcacgctctacacggcttggtgttgttacatatttcttagcgattgacggatacaatgcctttgtga

SEQ ID NO: 35164 - DNA, 260 bp, Unknown
  Description of Unknown: RightRegion for integrase B9165 sequence
cgcaatgtccttgattctgtacatgtttcccctgatggaatagaagttttcttcaagtaaaaagcagacatttctgcctgccgtttactaggagaatttcatgcccaaatgtcaactaaaccctacgcctataatatacaccaatatatcaccgaatgcaaacggtgattttttctttactaacatatgctaacctgtaggctatgacaagttagtatagaattttgcataaaaaaaacagcccgccgaatacccccgac

SEQ ID NO: 35165 - DNA, 260 bp, Unknown
  Description of Unknown: RightRegion for integrase B9166 sequence
cgaaatgtccttgattcagtccatgtttcccctgatgggatagaagtttttttcaagtaaaaagcagacatttctgcctgccgtttactaggagaatttcatgcccaaatgtcaactaaaccctacgcctataatatacaccaatcaatcaccgaatgcaaacggtgattttttctttactaagatatgttaacctgtatgctatgacaagttagtatagaatttcacgcataaaaaaacagcccgccgaatacccccga

SEQ ID NO: 35166 - DNA, 260 bp, Unknown
  Description of Unknown: RightRegion for integrase B9167 sequence
agagtcgtgaggagaatcgagatcaagcgtcactcagtcgacaaggtgtactttgtttaaatttttgtgcaatttttttgtgcttactttttgctattatgtcaccttgtcacttgtcatggtaacataatagtaaaaaatatcaataaaaagcactgattaagtgcaaatatatactttacaaagcactgaatcggtgctatactatagtcataacaaagaaaggaactgccaaaggtagtaaggtaaagggaaatgaa

SEQ ID NO: 35167 - DNA, 260 bp, Unknown
  Description of Unknown: RightRegion for integrase B9168 sequence
cgaaatgtccttgattctgtccacgtttcacctgatggaatagaagttttcttcaagtaaaaagcagacatttctgtctgcaatttactaggagaattttatgccctaatgtcaacaaagcctacatataatatacatcaatcaatcaccgaatgcaaacggtgatttttttctttactaacatagtttgacctgtaggttatggtaagttagtatagaattttatgcataaaaaaacagcccgccgaaaacctccgaca

SEQ ID NO: 35168 - DNA, 260 bp, Unknown
  Description of Unknown: RightRegion for integrase B9169 sequence
agagttgtgaggagaatcgagatcaagcgtcactcagtcgacaaggtgtactttgtttaaatttttgtgcaatttttttgtacttactttttgctattatgtcaccttgtcacttatcatagtaacataatagtaaaaaatatcaataaaaagcactgattaagtgcaaatatatgctttacaaagtaccaaatcggtgctatactatagccataacaaagaaaggaactgccaaaggtagtaaggtaaaatatggtgga

SEQ ID NO: 35169 - DNA, 166 bp, Unknown
  Description of Unknown: RightRegion for integrase B9170 sequence
agagttgtgaggagaatcgagatcaagcgtcactcagtcgacaaggtgtactttgtttaaatttttgtgcaatttttttgtacttactttttgctattatgtcaccttgtcacttatcatagtaacataatagtaaaaaatatcaataaaaagcactgattaagtg

SEQ ID NO: 35170 - DNA, 260 bp, Unknown
  Description of Unknown: RightRegion for integrase B9171 sequence
cgaaatgtacttgattctgtccacgtttcccctgatggaatagaagttttcttcaaataaaaagcagacatttctgcctgccctttaatagaagaacgatatatacagatttcaatcatactgcacctataatatacaccaatcaatcaccgaatgcaaacggtgattttttctttactaacattatgtgacctgtaggctatgacaagttagtatagaattttgcataaaaaaatcagcccgccgaaatccccgacagg

SEQ ID NO: 35171 - DNA, 260 bp, Unknown; identical to SEQ ID NO: 35134
  Description of Unknown: RightRegion for integrase B9172 sequence

SEQ ID NO: 35172 - DNA, 260 bp, Unknown
  Description of Unknown: RightRegion for integrase B9173 sequence
cgaaatgttcttgattctgtccatgtttcacctgacaaaatagaagttttcttcaagtaaaaagcagacatttctgcctgccctttactaggagaatttatgaccaatgtcaacgaaaatacatctataatatacaccaatcaatcaccgaatgcaaacggtgattttttctttactaagatatgctaacctgtaggctatgacaagttagtatagaatttttcaaataaaaaaacagcccgccgaacgctccgacaggc

SEQ ID NO: 35173 - DNA, 260 bp, Unknown
  Description of Unknown: RightRegion for integrase B9174 sequence
agagttgtgaggagaatcgagatcaagcgtcactcagtcgacaaggtgtacttcgtttaaatttttgtgcaatttttttgcacttactttttgctattatgtcaccttgtcagatatcatagtaacataatagtaaaaaatatcaataaaaagcactgattaagtgcaaatatatgctttacaaagtaccaaatcggtgctatactatagccataacaaagaaaggaactgccaaaggtagtaaggtaaaatatggtgga

SEQ ID NO: 35174 - DNA, 260 bp, Unknown
  Description of Unknown: RightRegion for integrase B9175 sequence
cgaaatgtccttgattctgtccatgtttcccctgatggaatagaagttttcttcaagtaaaaagcagacatttctgcctgccatttactaggagaatctatgaccaatgtcaacgaaaatacatctataatatacaccattcaatcaccgaatgcaaacggtgattttttctttactaacattatgcgacctgtaggctatgacaagttagtatagaattttgcaaataaaaaaaacagcccgccgaaaaccgacaggct

SEQ ID NO: 35175 - DNA, 260 bp, Unknown
  Description of Unknown: RightRegion for integrase B9176 sequence
cgaaatgtccttgattctgtccacgtttcccctgatggaatagaagttttcttcaagtaaaaagcagacatttctgtctgccatttactaggagaaatttatgccccaatgtcaacaaagcccacctataatatacatcaatcaatcaccgaatgcaaacggtgattttttctttactaacatggtttaacctgtaggctatgacaagttagtatagaattttttgcataaaaaaacagcccgccgaaaacctccggcgg

SEQ ID NO: 35176 - DNA, 260 bp, Unknown
  Description of Unknown: RightRegion for integrase B9177 sequence
cgaaatgtccttgattctgtccatgtttcccctgatgggatagaagtttttttcaagtaaaaagcagacatttctgcctgccgtttactaggagaatttcatgcccaaatgttaactaaaccctacgcctataatatacaccaatcaatcacctaatgcaaacggtgatttttttctgtactaacatggtatgacctgtaggctgtgacaagttagtatagaattttatgcataaaaaaacagcccgccgaatacccccg

SEQ ID NO: 35177 - DNA, 260 bp, Unknown
  Description of Unknown: RightRegion for integrase B9178 sequence
atagaagccatatatctcgatgagcacacgcataagatatccggcattaagttcttatagattagtgggtacagaaaaattacttacacagttgagtttgagccgcatgcgacacttctggaaaacgaaggtgccggttacgttgtaagctctcttggcattgagagcggatatgtaccatacactgcatactgtgcaaaaaaaagttatattaaaaatcacccggagataatacagtcatttacaaatgcaatacaaaa

SEQ ID NO: 35178 - DNA, 67 bp, Unknown
  Description of Unknown: RightRegion for integrase B9179 sequence
aaagataaaatcaaaatactctgtctcttatacacatctccgagcccacgagacgcgtagtaatctc

SEQ ID NO: 35179 - DNA, 260 bp, Unknown
  Description of Unknown: RightRegion for integrase B9180 sequence
tggcttgacggtttccgccacggggacagaaaaagcccagagttggacggatgctcgtaagacagtaattctaaaaaattactattttacggcatctgtctgacagggttggaaacatcaacgaaaagaacgatgtcgagtcgaaagacttagcatcgttcttttttatctcaaaatcattgaaattacggaggtttgctatgaagcgtcttttatcttgcgaatttaacatggataccgcctgtgtggagctgaagttc

SEQ ID NO: 35180 - DNA, 260 bp, Unknown
  Description of Unknown: RightRegion for integrase B9181 sequence
tcggtcattaaagaaattcaagtggataaagaacgaaatttccatattatttttttataatttttataccactaactagtattaacccgtcggttcatccgccagtaaaatcgcaggttttgccgctaaagctcttgcaatcgctactcgctgctgctgtccgccggataaagcatggggcagactttctaattttttccttatgcctaaagtagtaataatttcctccacatatcctttttcaatttttttcccatcca

SEQ ID NO: 35181 - DNA, 109 bp, Unknown
  Description of Unknown: RightRegion for integrase B9182 sequence
accataaaagagattcacttgaatgaagatttctctgtaaaatccgtggattttttatagagtgtcttgtactaactggtgaaccccaaatcctgttaccaagtctaat

SEQ ID NO: 35182 - DNA, 260 bp, Unknown
  Description of Unknown: RightRegion for integrase B9183 sequence
cgcttcatcaagcggattgatgcagacaacgatggcgcgtttttcgtaacgccgcgttaggcatattttaccttggcggacacaaagggtaagtatgcctaaaaatcccccgccgtaaatgacgggggattttttacctatcgagtttacgcatgacgctattgtagacgcgctcgttaacaactttcaaactgtccatcagttcgtccataaccgcccatgccacacttggctcaacagctgatacggcccgcagaaag

SEQ ID NO: 35183 - DNA, 260 bp, Unknown
  Description of Unknown: RightRegion for integrase B9184 sequence
cgcttcatcaggcggattgatgcagacaacgatggcgcgttttttgtaacaccgcgttaggcatattttaccttcatggacgcaaagggtaaatatgcctaaaaatcccccgccgtaaatgacgggggattttttcacttgtatagcttacgcatgacgctgttgtagacgcgctcgttaacaacttttaagctgtccatcagttcgtccatgattgcccatgccacacttggctcaacagatgatacagcctggaggaa

SEQ ID NO: 35184 - DNA, 260 bp, Unknown
  Description of Unknown: RightRegion for integrase B9185 sequence
cgcttcatcacgcggattgatgcagacaacgatggcgcgtttttcgtaacgccacgttaggcatattttaccttggcggacacaaagggtaagtatgcctaaaaatcccccgccgtaaatgacgggggattttttacctatcgagtttacgcatgacgctgttgtagacgcgctcgttaacaactttcaaactgtccatcagttcgtccataaccgcccatgcaacacttggctcaacagctgatacggcccgcagaaag

SEQ ID NO: 35185 - DNA, 260 bp, Unknown
  Description of Unknown: RightRegion for integrase B9186 sequence
cgcttcatcaagcggattgatgcagacaacgatggcgcgtttttcgtaacgccgcgttaggcatattttaccttggtggagttcaccgtgtacccgaagtacttctgcagcgtctccagatcgccccggtcccaggccacctcgatggcgtggcggatggcccgctccacgcggctgggcgtggtactgaaccgcttggccacctcggggtacagcaccttggtgacggcgttgatgacctccatgtcccccacggtgat

SEQ ID NO: 35186 - DNA, 260 bp, Unknown
  Description of Unknown: RightRegion for integrase B9187 sequence
cgcttcatcaagcggattgatgcagacaacgatggcgcgtttttcgtaacgccgcgttaggcatattttacctttgcggacacaaagggtaagtatgcctaataatcccccgccgtaaatgacgggggattttttacctatcgagtttacgcatgacgctgttgtagacgcgctcgttaacaactttcaaactgtccatcagttcgtccataaccgcccatgccacacttggatcaacagctgatacggcccgcagaaag

SEQ ID NO: 35187 - DNA, 260 bp, Unknown; identical to SEQ ID NO: 34999
  Description of Unknown: RightRegion for integrase B9188 sequence

SEQ ID NO: 35188 - DNA, 260 bp, Unknown
  Description of Unknown: RightRegion for integrase B9189 sequence
cgctttatccggagaattgacacagatgacgacggcgcgttttttgtaacgccgcgttaggcatatttgaccttcgtgttccaaaaggtaaattatgcccaaaagaatcccccgccttacgacgggggtgttctcatttttcgagtttccgcatgacgctattatagacgcgctcgtttacaattttcaaactgtccatcagctcatcaatgatctcccacgccttgtccggtggtacatcagccaccgcccgcaggaag

SEQ ID NO: 35189 - DNA, 260 bp, Unknown
  Description of Unknown: RightRegion for integrase B9190 sequence
cgcttcatcaagcggattgatgcagacaacgatggcgcgtttttcgtaacgccgcgttaggcatattttaccttggcggacacaaagggtaagtatacctaaaaaatcccccgccgtaaatgacgggggattttttacctatcgagtttacgcatgacgctgttgtagacgcgctcgttaacaactttcaaactgtccatcagttcgtccataaccgcccatgccacacttggctcaacagctgatacggcccgcagaaa

SEQ ID NO: 35190 - DNA, 260 bp, Unknown
  Description of Unknown: RightRegion for integrase B9191 sequence
cgcttcattcggagaattgatgcagataacgacggcgcgttttttgtaacgccccgttaggcatatttgaccttcgcgttccgaaaggtaaattatgcccaaaagatacccccgccttacgacgggggcgttcttatttttcgagcttccgcatgacgctattatagacgcgctcgttcacgattttcaagctgtccatcaactcgtccatgattccccatgccttgtctggcggaacatctgccactgcgcgcagaaaa

SEQ ID NO: 35191 - DNA, 260 bp, Unknown
  Description of Unknown: RightRegion for integrase B9192 sequence
cgctttatccggagaattgacgcagatgacgacggcgcgttttttgtaacgccccgttaggcatatttgaccttcgtgttcccaaaggtaaattatgcccaaaagaacacccccgccttacgacgggggtgttctcatttttccagcttccgcatcacgctgttgtacacgcgctcgttgacgattttcaggctgtccatcagctcgtccatgacctcccacgctcttgccggagccatgtccgagacggcctgcaaaaa

SEQ ID NO: 35192 - DNA, 260 bp, Unknown
  Description of Unknown: RightRegion for integrase B9193 sequence
cgctttatccggagaattgacacagatgacgacggcgcgttttttgtaacgccgcgttaggcatatttgaccttcgtgttccaaaaggtaaattatgcccaaaagaatcccccgccttacgacgggggtgttctcatttttcgagtttccgcatgacgctattatagacgcgctcgtttacaattttcaaactgtccatcagctcatcaatgatctcccacgccttgtccggtggcacatcagccaccgcccgcaggaag

SEQ ID NO: 35193 - DNA, 260 bp, Unknown
  Description of Unknown: RightRegion for integrase B9194 sequence
cgctttatccggagaattgacgcagatgacgacggcgcgttttttgtaacgccccgttaggcatatttgaccttggtgttccaaaaggtaaattatgcccaaaagaacacccccgccttacgacgggggtattctcatttttcgagcttccgcattacgctgttgtacacgcgctcgttgacgattttaaggctgtccatcagctcgtccatgacctcccacgctcttgccggagccatgtcggagacggcctgtaaaaa

SEQ ID NO: 35194 - DNA, 260 bp, Unknown
  Description of Unknown: RightRegion for integrase B9195 sequence
cgctttattcggagaattgacgcagatgacgacggcgcgttttttgtaacgccacgttaggcatatttgaccttggtgttcccaaaggtaaattatgcccaaaagaacacccccgccttacgacgggggtgttctcatttttcgagtttccgcatcacgctgttgtacacgcgctcattgacgattttaaggctgtccatcagctcgtccatgacctcccacgctcttgccggagccatgtcggaaacggcctgcaaaaa

SEQ ID NO: 35195 - DNA, 260 bp, Unknown
  Description of Unknown: RightRegion for integrase B9196 sequence
cgcttcatcaagcggattgatgcagacaacgatggcgcgtttttcgtaacgccgcgttaggcatattttaccttggcggacacaaagggtaagtatacctaaaaatcccccgccgtaaatgacgggggattttttacctatcgagtttacgcatgacgctgttgtagacgcgctcgttaacaactttcaaactgtccatcagttcgtccataaccgcccatgccacacttggctcaacagctgatacggcccgcagaaag

SEQ ID NO: 35196 - DNA, 260 bp, Unknown
  Description of Unknown: RightRegion for integrase B9197 sequence
cgctttatccggagaattgacgcagatgacgacggcgcgttttttgtaacgccacgttaggcatatttgaccttggtgttggataccgtgtagccaaaatagcgctggagcgtctcaaggtcgccgcggtcccacgcgacctcgatcgcatggcgcaccgcgcgctcgacgcgcgagggcgtggtgctgtagcggcgcgcgacttcgggataaagcactttcgtcacggcgttgatgacatccatgtcctgcacggcgat

SEQ ID NO: 35197 - DNA, 260 bp, Unknown; identical to SEQ ID NO: 35189
  Description of Unknown: RightRegion for integrase B9198 sequence

SEQ ID NO: 35198 - DNA, 260 bp, Unknown
  Description of Unknown: RightRegion for integrase B9199 sequence
cgcttcatcaagcggattgatgcagacaacgatggcgcgtttttcgtaacgccgcgttaggcatattttaccttggcggacacaaagggtaagtatacctaaaaaatcccccgccgtaaatgacgggggattttttacctatcgagtttacgcatgacgctgttgtagacacgctcgttaacaactttcaaactgtccatcagttcgtccataaccgcccatgccacacttggctcaacagctgatacggcccgcagaaa

SEQ ID NO: 35199 - DNA, 260 bp, Unknown
  Description of Unknown: RightRegion for integrase B9200 sequence
cgcttcatcaagcggattgatgcagacaacgatggcgcgtttttcgtaacgccgcgttaggcatattttaccttggcggacacaaagggtaagtatgcctaaaaatcccccgccgtaaatgacgggggattttttacctatcgagtttacgcatgacgctgttgtagacgcgctcgttaacaactttcaaactgtccatcagttcgtccataaccgcccatgccacacttggatcaacagctgatacggcccgcagaaag

SEQ ID NO: 35200 - DNA, 137 bp, Unknown
  Description of Unknown: RightRegion for integrase B9201 sequence
attaaagaaatacatatcattgatcagaataatgaaaattatgagattttttttaattaatttgtgtactaaacaaggtataccattaggaactagtatattagtacactaataacaattgtacatatataataagg

SEQ ID NO: 35201 - DNA, 260 bp, Unknown
  Description of Unknown: RightRegion for integrase B9202 sequence
cgcttcatcaggcggattgatgcagacaacgatggcgcgttttttgtaacgccgcgttaggcatattttaccttcacggacgcaaagggtaagtatgcctaaaaatcccccgccgtaaatgacgggggattttttacctatcgagtttacgcatgacgctgttgtagacgcgctcgttaacaactttcaaactgtccatcagttcgtccataaccgcccatgccacacttggctcaacagctgatacggcccgcagaaag

SEQ ID NO: 35202 - DNA, 260 bp, Unknown
  Description of Unknown: RightRegion for integrase B9203 sequence
cgctgcatcaagcggattgatgcagacaacgatggcgcgtttttcgtaacgccgcgttaggcatattttaccttggcggagttcaccgtgtagccgaagtacttctgcagcgtctccagatcaccgcggtcccacgccacctcgatggcgtgccggatggccctctccacccggctgggcgtggtgctgaagcgcctggccacctccggatacagtaccttggtcacggcgttgatgacctccatgtcgtccacggtaat

SEQ ID NO: 35203 - DNA, 260 bp, Unknown
  Description of Unknown: RightRegion for integrase B9204 sequence
cgcttcatcaagcggattgatgcagacaacgatggcgcgtttttcgtaacgccgcgttaggcatattttaccttggcggacacaaaggggaagtatacctaaaaaatcccccgccgtaaatgacgggggattttttacctatcgagtttacgcatgacgctgttgtagacgcgctcgttaacaactttcaaactgtccatcagttcgtccataaccgcccatgccacacttggctcaacagctgatacggcccgcagaaa

SEQ ID NO: 35204 - DNA, 260 bp, Unknown
  Description of Unknown: RightRegion for integrase B9205 sequence
agaaaatatgtagaccgaatttactttgatggacatgatcttaaagtggtgtactattagtatataaccggttggttttggcgcaaataaagaatttaccttgatggaaaaagctttctatgcccaaaaacactgcaaagaatatctagaatctggcgttacttttattcgtgttgtgggtacggaagaaaactatgaccttcaaattaaagaagctattgaaaatcatgtgattgaaggacctcatatgtattgtgcag

SEQ ID NO: 35205 - DNA, 79 bp, Unknown
  Description of Unknown: RightRegion for integrase B9206 sequence
cgctttatccggagaattgacgcagatgatgacggcgcgttttttgtaacgccccgttaggcatatttgccctttgtcg

SEQ ID NO: 35206 - DNA, 260 bp, Unknown
  Description of Unknown: RightRegion for integrase B9207 sequence
cgcttcatcaggcggattgatgcagacaacgatggcgcgttttttgtaacaccgcgttaggcatattttaccttcatggagtttaccgtatagccgaaatacttctgcagcgtctcgatgtcgccccggtcccatgccacctcgatggcgtgacggatggcccgttccacccgggatggggtagtacagaaccgtttggctacctccggatacagtacctttgtcacagcgttgatcacatccatgtcattcaccgcgat

SEQ ID NO: 35207 - DNA, 260 bp, Unknown
  Description of Unknown: RightRegion for integrase B9208 sequence
ataatagataaaataaaaatagagggcactaaaccctcatcaataaaatttttagaataattcatcccctaactaacgtaaccgttctgtctggttaattagggaataattattttacatcaattaataaacatattatatagtaatgtaagaatattgacaaattattttataaatgatatatttagtatagtcacactcgcattgagtgttgtgagtagaaattgttttttttactataaagaagctatttattgttt

SEQ ID NO: 35208 - DNA, 260 bp, Unknown
  Description of Unknown: RightRegion for integrase B9209 sequence
ataatagataaaataaaaatagagggcactaaaccctcatcaataaaatttttagaataattcatcccctaactaacgtaaccgttctgtctggttaattagggaataattattttacatcaattaataaacatattatatagtaatgtaagaatattgacaaattattttataaatgatatgtttagtatagtcacactcgtattgagtgttgtgagtagaaattgttttttttactataaagaagctatttattgttt

SEQ ID NO: 35209 - DNA, 260 bp, Unknown
  Description of Unknown: RightRegion for integrase B9210 sequence
cgcttcatcaagcggattgatgcagacaacgatggcgcgtttttcgtaacgccgcgttaggcatattttaccttggcggacacaaagggtaagtatacctaaaaaatcccccgccgtaaatggtcgggggtcgtaagaaagtaatatcgtatttttgcaggaacggcatggcttcggtcatgccgtttcctccttcatcagttcattcagcgggataaagcccacaaggtcataggaaatgcggatgttctgccgccgtt

SEQ ID NO: 35210 - DNA, 220 bp, Unknown
  Description of Unknown: RightRegion for integrase B9211 sequence
attaaagaaatacatatcattgatcagaataatgaaaattatgagattttttttaattaatttgtgtactaaacaaggtatgccattaggaataacaagtaacaaaataactaaaattactgaaatacaaaaaatcatctcaatcaatgtaaagccattattccttttcatctttcatacctcctataaattactgactacattcatcatcggaataaca

SEQ ID NO: 35211 - DNA, 260 bp, Unknown; identical to SEQ ID NO: 35182
  Description of Unknown: RightRegion for integrase B9212 sequence

SEQ ID NO: 35212 - DNA, 260 bp, Unknown
  Description of Unknown: RightRegion for integrase B9213 sequence
cgctttatccggagaattgacgcagatgacgacggcgcgttttttgtaacgccccgttaggcatatttgccctttgtcgacatgaaggtaaaatacacctaaaagaaaacccccgccttgtgacgggggcattcttacttttccagtttccgcataacgctattatagacgcgctcatttacgatttttaaactgtccatcagctcgtccatgatttcccacgccttgtcctgcggcacgtcagccaccgcccgcagaaa

SEQ ID NO: 35213 - DNA, 117 bp, Unknown
  Description of Unknown: RightRegion for integrase B9214 sequence
cgcttcatcaagcggattgatgcagacaacgatggcgcgtttttcgtaacgccgcgttaggcatattttacctttgcggacacaaagggtaagtatgcctaaaaaacccccgccgta

SEQ ID NO: 35214 - DNA, 260 bp, Unknown
  Description of Unknown: RightRegion for integrase B9215 sequence
cgctttctcaagcggattgatgcagacaacgatggcgcgtttttcgtaacgccgcgttaggcatattttaccttggcggacacaaagggtaagtatgcctaaaaatcccccgccgtaaatgacgggggattttttacctatcgagtttacgcatgacgctgttgtagacgcgctcgttaacaactttcaaactgtccatcagttcgtccataaccgcccatgccacacttggctcaacagctgatacggcccgcagaaag

SEQ ID NO: 35215 - DNA, 260 bp, Unknown
  Description of Unknown: RightRegion for integrase B9216 sequence
aatatacttaaagagatagatataaccaaggaggctattaatattgtgttccctgtataatcacattactttattttacattactgttcaataatatcatgcatatacaaatcctcctctgaattaaattatttaaaaagtactttttatattgtggatattatcacatatttaaaagtttgtaaagtataaaaatatataaatttcaaaaaaagacttttgcatcagaatataatgcaaaagtcttaaaatactatttc

SEQ ID NO: 35216 - DNA, 260 bp, Unknown
  Description of Unknown: RightRegion for integrase B9217 sequence
ctaaagctaaaagaaatccggctgtaccaagatcgccggatagacttcgatttcctttaattccatagttgtacttatccaaatggttaatgtaatctatggaacgcccccgcccattgtaggcgggggcataatttattcatgttccacgatcccgtggtaatacgccgccagctttttctttgctcccggaccgtccttgtccatcagaaatgcccttgccatatccgcgtaaaactccgcaatggacacgccgtatt

SEQ ID NO: 35217 - DNA, 260 bp, Unknown
  Description of Unknown: RightRegion for integrase B9218 sequence
aaagcaaggcaaaaaaagattgaacaatacaaaaaaagaggaggtggattaaatgggtaaagttagaataattccacaaacaatcaatccattaactcaagttaaaattggtactattaaaaagaagaaagttgctgcatatgctcgtgtttcaactgatcaagaagagcaagaatcatcttttgatgctcaagtacaacattttactgaatacattaaaagtcgagatgattgggaattcataaaggtttattctgatg

SEQ ID NO: 35218 - DNA, 109 bp, Unknown
  Description of Unknown: RightRegion for integrase B9219 sequence
attatagagattataattatatctcgcgaaacttttattgaggatattatatttttttagttttatttactgtagtaaccactgtaacccatctgcttttaatgcacta

SEQ ID NO: 35219 - DNA, 109 bp, Unknown; identical to SEQ ID NO: 35218
  Description of Unknown: RightRegion for integrase B9220 sequence

SEQ ID NO: 35220 - DNA, 260 bp, Unknown
  Description of Unknown: RightRegion for integrase B9221 sequence
aatatacttaaagagatagatataaccaaggaggctattaatattgtgttccctgtataatcacattactttattttacattactgttcaataatatcatgcatatacaaatcctcctcttgattaaattatttaaaaagtactttttatattgtggatattatcacacatttaaaagtttgtaaagtataaaaatatataaatttcaaaaaaagactttcgcatcagaatataatgcaaaagtcttaaaatactatttc

SEQ ID NO: 35221 - DNA, 260 bp, Unknown
  Description of Unknown: RightRegion for integrase B9222 sequence
ctaaagctaaaagaaatccggctgtaccaagatcgccggatagacttcgatttcctttaattccatagttacacctaaccaaatggttaatgtaatctatggaacgcccccgcccattgtaggcgggggcacaatttattcatgttccacgatcccgtggtaatacgctgccagctttttctttgctcccgggccgtccttgtccatcagaaatgcccttgccatatccgcgtaaaactccgcaatggacacgccgtact

SEQ ID NO: 35222 - DNA, 260 bp, Unknown
  Description of Unknown: RightRegion for integrase B9223 sequence
aaaaaaatctccgtcagcaacgacggcgaaataaattttgaattagctggctatatttaacctttggtgtgctcacagttaattataaccaaataatagaggggcggttatccgcccctctacttatatgctccgcagtcgctccatcacgctgcgatacgctttgggcattgataccctgagcgtatccatgagatcatccatgatatccatcactgcctgattgtcgcggcccaaaatggtacgtaaaaaatcgctat

SEQ ID NO: 35223 - DNA, 260 bp, Unknown
  Description of Unknown: RightRegion for integrase B9224 sequence
agtatcattgacattataattattgagggagtaacccctgtggaattaaaatttgtataaaagtatatcccctatcctgcataacagttctgtcttgcaggatagggtataacttaactttcatacataattacactactctcaaacaatataaaccattagctttgtttaactttagtctttttcaaaatagaatttattttactcctgtatgcagcatctaaaggtgaatcccaatttttgaaattaactccatcaac

SEQ ID NO: 35224 - DNA, 260 bp, Unknown
  Description of Unknown: RightRegion for integrase B9225 sequence
ggcgacatcttttttgagcttgtttggctacaaagaaccttaacaccagttaacgtataatatagctaaataggggatgcattatgcatcccctaaaatatagtttactgctttttcagctttgccagcggcagagattatcatagttggatcattttttagaacttgcatccaaccttgaagatatgcagcgctatttcggaaagaagctcttgtttctatccctacatgggcgacaaggtttgccgcgccgagctctg

SEQ ID NO: 35225 - DNA, 260 bp, Unknown
  Description of Unknown: RightRegion for integrase B9226 sequence
tcttttattgatcgcatagttataaaatcatacgacgaaatcgatatttttcttttgtgagtaactactgactattatcccttacactgcagaaatcggttatcagcattttggtctgattataacaatttttcataacaaggcattcgttgtgccgatgagcgggaatcatacggcttatctgcaggcctacagcaaggagaatccgaaagggaagcgtcatttgatgcgcctggggaaaatcaagggaatgaataagg

SEQ ID NO: 35226 - DNA, 260 bp, Unknown
  Description of Unknown: RightRegion for integrase B9227 sequence
ctaaagctaaaagaaatccggctgtaccaagatcgccggatagacttcgatttcctttaattccatagttgcacctaaccaaatggttaatgtaatctatggaacgcccccgcccattgtaggcgggggcataattcattcgtgttccacgatcccgtggtaatacgccgccagctttttcttcgctcccggaccgtccttgtccatcagaaacgcccttgccatatccgcgtaaaactccgcaatggacacgccgtact

SEQ ID NO: 35227 - DNA, 260 bp, Unknown
  Description of Unknown: RightRegion for integrase B9228 sequence
ctaaagctaaaagaaatccggctgtaccaagatcgccggatagacttcgattttctttaattccatagttgcacctaaccaaatggttaatgtaatctatggaacgcccccgcccattgtaggcgggggcataatttattcatgttccacgatcccgtggtaatacgccgccagctttttctttgctcccggaccgtccttgtccatcagaaatgcccttgccatatctgcgtaaaactccgcaatggacacgccgtatt

SEQ ID NO: 35228 - DNA, 260 bp, Unknown
  Description of Unknown: RightRegion for integrase B9229 sequence
aatatacttaaagagatagatataaccaaggaggctattaatattgtgttccctgtataattacattactttattttacattactgttcaataatatcatgcatatacaaatcctcctcttgattaaattatttaaaaagtactttttatattgtggatattatcacacatttaaaagtttgtaaagtataaaaatatataaatttcaaaaaaagactttcgcatcagaatataatgcaaaagtcttaaaatactatttc

SEQ ID NO: 35229 - DNA, 260 bp, Unknown
  Description of Unknown: RightRegion for integrase B9230 sequence
attatagagattataattatatctcgcgaaacttttattgaggatattatatttttttaattttatttactgtagtaaccactataacccgtctgcttttaatgcactaccggcattgaatccaaaccatccaaaccaaagaagagaggctccgagaacaacagatggaatattatgaatacgataggttgtatgttcataaccacgtcttcttccaagaataatagcaagcactaatgcactgatacctgaactgatat

SEQ ID NO: 35230 - DNA, 260 bp, Unknown
  Description of Unknown: RightRegion for integrase B9231 sequence
aatatacttaaagagatagatataaccaaggaggctattaatattgtgttccctgtataatcacattactttattttacattactgttcaataatatcatgcatatacaaatcctcctcttgattaaattgtttaaaaagtactttttatattgtggatattatcacacatttaaaagtttgtaaagtataaaaatatataaatttcaaaaaaagactttcgcatcagaatataatgcaaaagtcttaaaatactatttc

SEQ ID NO: 35231 - DNA, 260 bp, Unknown
  Description of Unknown: RightRegion for integrase B9232 sequence
aatatacttaaagagatagatataaccaaggaggctattaatattgtgttccctgtataatcacattactttattttacattactgctcaataatatcatgcatatacaaatcctcctcttgattaaattatttaaaaagtactttttatattgtggatattatcacacatttaaaagtttgtaaagtataaaaatatataaatttcaaaaaaagactttcgcatcagaatataatgcaaaagtcttaaaatactatttc

SEQ ID NO: 35232 - DNA, 260 bp, Unknown
  Description of Unknown: RightRegion for integrase B9233 sequence
agaaaatatatagaccgaatttactttgatggacatgattttaaagttgtgtaccaatagtgcatgaccattcggacatctcatcacctccatactcttaaacgttttttttagcactttttccagaaaactttcattatttttttgattttttgaacttttttgtctaaaatgaaacaatgatgaaatttctaacatatattcacgtttatttaatccaagccatcctgaatttccttccattttgctggattgacgtc

SEQ ID NO: 35233 - DNA, 260 bp, Unknown
  Description of Unknown: RightRegion for integrase B9234 sequence
ataataaataacaaaaataaaaagagaggagcaaatggaaaatggcaaaagtcagagtaatacctagcacactaaatccacttactcaatctccaattagtgaaacaaagaaaaagaaagttgctgcctatgctcgtgtttcaactgactcagatgagcaatatacttcatacgaaatgcaagttaaatattataaaaaattcattcaagaacatgatggatggatttatgtaaatgtttatgctgatgaaggtataact

SEQ ID NO: 35234 - DNA, 260 bp, Unknown
  Description of Unknown: RightRegion for integrase B9235 sequence
ctcaaaataaaagaaatccgggtctacaaagatcgccggattgattttgactttatttaattccctagtttgtgttaaccattaggttaacacaaactagggaacgagacagcacccccgcacactatgcgggggtgctgtctatctgttgagctttgccatcacgctattatacaccctgctatttgaaataatcagcgcatccataagctcgtccatcacgccccatgctttttccggtgacgctttggcgactgctt

SEQ ID NO: 35235 - DNA, 260 bp, Unknown
  Description of Unknown: RightRegion for integrase B9236 sequence
aaaagaatctccgtcgatcaggacgggggaataaattttgaattagttggccatatttgacattaggagtactcacagttaattatagccaaacaatagaggggcggttatccgcccctctacctatatactccgcagtcgctccatcacactgcgatacgcttttggcatagctactctgagcgtgtccatgagatcatccatgatatccattactgcctgattgtcgcggcccgaaacagtacgtaaaaaatcgctgt

SEQ ID NO: 35236 - DNA, 260 bp, Unknown
  Description of Unknown: RightRegion for integrase B9237 sequence
ctcaaaataaaagaaatccggctatacaaagacagccggattgaattcgattttctctaaaaacttagttagacgtaacctgacggttgcatccaactaagtacacggcaatatcccccgcccaaacaggcgggggatcgcttatcctcgcatctttcgcatcacgttatcatacattcgcgcattggttactttcagcgcatccatcaactcgtccactatggcccacgcctgttccggcgcgcgggatgataccgctt

SEQ ID NO: 35237 - DNA, 260 bp, Unknown
  Description of Unknown: RightRegion for integrase B9238 sequence
ctcaaaataaaagaaatccggctatacaaagaccgccggattgaatttgattttctgtaagtacttagtttctataacccgttaggttacagcaaactaagtacacaagaatatcccccgccaaaacaggcgggggatactttatcctcgcatctttcgcatcacgttatcatacattcgcgcgttggttactttcagcgcatccatcaactcgtccactatggcccacgcctgttccggcgcgcgggatgataccgctt

SEQ ID NO: 35238 - DNA, 260 bp, Unknown
  Description of Unknown: RightRegion for integrase B9239 sequence
ctaaaaataaaagaaatccggctatacaaagaccgccggattgaatttgattttctgtaagtacttagtttatataacccgttaggttacacaaaactaagtacacaagagtatcccccgccaaaacaggcgggggatattttatcctcgcatctttcgcatcacgttatcatacattcgcgcgttggtcactttcagcgcatccatcaactcgtccactatggcccacgcctgttccggcgcgcgggatgataccgctt

SEQ ID NO: 35239 - DNA, 109 bp, Unknown
  Description of Unknown: RightRegion for integrase B9240 sequence
ctcaaaataaaagaaatccggctatacaaagaccgccggattgaatttgattttctgtaagtacttagtttatataaaccttttcccaaggtgcggtataccgagcgtc

SEQ ID NO: 35240 - DNA, 260 bp, Unknown
  Description of Unknown: RightRegion for integrase B9241 sequence
ctcaaaataaaagaaatccggctatacaaagaccgccggattgaatttgattttctgtaagtacttagtttatataaaccgttaggttacacaaaactaagtacacaagagtatcccccgccaaaacaggcgggggatactttatcctcgcatctttcgcatcacgttatcatacattcgcgcattggttactttcagcgcatccatcaactcgtccactatggcccacgcctgttccggcgcgcgggatgataccgctt

SEQ ID NO: 35241 - DNA, 109 bp, Unknown
  Description of Unknown: RightRegion for integrase B9242 sequence
caaattattgactatatagactttgacgctgatttaaagcctattatacattttaaatagcttgtactataggcaacacttctaagggtaaggcttgtaagagctccgg

SEQ ID NO: 35242 - DNA, 260 bp, Unknown
  Description of Unknown: RightRegion for integrase B9243 sequence
aaggctcgtcaaagggcgatagcgcaatatcgaagaaaggaaggcaagcacaatggctaaggttaccatcatcccatcgaaaataaacccaataacgcttactcccgttgggcaagtggccaaaaggaaggttgccgcttacgctcgtgtttcaaccgacagcgacgagcagtacacaagctacgatgctcaagtcacttactacacgaacttcataaatggcaaaccgaactgggaattcgtaaaggtctatgcggacg

SEQ ID NO: 35243 - DNA, 260 bp, Unknown
  Description of Unknown: RightRegion for integrase B9244 sequence
ctcaaaataaaagaaatccggctatacaaagacagccggattgaattcgattttctctaaaaacttagttagacgtaacctgacgcatgcgggcgttttttcggtcgatttcagccggatagacacaggcaaaaccgtgtgttttcttgtgtcaggcggcctttcggctgccgctggtttgttggcgtaggggacggcgtcccgacgtcccgtcagcgcggcagcgccgcgccggaaaacggattcccacgccagtgtgt

SEQ ID NO: 35244 - DNA, 260 bp, Unknown
  Description of Unknown: RightRegion for integrase B9245 sequence
ctcaaaataaaagaaatccggctatacaaagaccgccggattgaatttgattttctgtaagtacttagtttatataaaccgtttccgaaggtccgctacaccgagcgtcccgacgtggccacggcctgcatcatggagggcgatgtggtggtgatggtggacaactccccgtcggcgctgctgctgcccaccacgctgctgcggtttaccgaggagatcaacgactactatttcccgccccttatcggctcttacctcca

SEQ ID NO: 35245 - DNA, 260 bp, Unknown
  Description of Unknown: RightRegion for integrase B9246 sequence
ctcaaaataaaagaaatccggctatacaaagacagccggattgaattcgattttctctaaaaacttagttagacgtaacctgacggttgcgtcaaactaagtacacggcaatatcccccgccaaaacaggcgggggatactttatcctcgcatctttcgcatcacgttatcatacattcgcgcattggttactttcagcgcatccatcaactcgtccactatggcccacgcctgttccggcgcgcgggatgataccgctt

SEQ ID NO: 35246 - DNA, 260 bp, Unknown
  Description of Unknown: RightRegion for integrase B9247 sequence
ctcaaaataaaagaaatccggctatacaaagaccgccggattgaatttgactttctgtaagtacttagtttatataaaccgttaggttacaacaaactaagtacacaagaatatcccccgccaaaacaggcgggggatactttatcctcgcatctttcgcatcacgttatcatacattcgcgcattggttactttcagcgcgtccatcaactcgtccactatggcccacgcctgttccggcgcgcgggatgataccgctt

SEQ ID NO: 35247 - DNA, 109 bp, Unknown
  Description of Unknown: RightRegion for integrase B9248 sequence
ctaaaaataaaagtaatccggctatacaaagaccgccggattgaatttgattttctgtaagtacttagtttatataaaccttttcccaaggtgcggtataccgagcgtc

SEQ ID NO: 35248 - DNA, 260 bp, Unknown
  Description of Unknown: RightRegion for integrase B9249 sequence
tggagaaaatatatagaacgaatttactttgacgggcataactttaaagtggtgtactaataatatagcaccggttggttgatatctattagtacacacagaaaaacgaagaggacttgaaaatatagcgagccctcttttttgttttacttctcaataaggaagttgtttaagtcatctcgtacatgtttaagttggtcaatgccattaccagtaattgtgtgattgattatgacatacaaacttttcatgattacttt

SEQ ID NO: 35249 - DNA, 260 bp, Unknown
  Description of Unknown: RightRegion for integrase B9250 sequence
ctaaaaataaaagaaatccggctatacaaagaccgccggattgaatttgattttctgtaagtacttagtttatataaacctttaggttacagcaaactaagtacacaagaatatcccccgcccaaacaggcgggggatactttatcctcgcatctttcgcatcacgttatcatacattcgcgcgttggttactttcagcgcatccatcaactcgtccactatggcccacgcctgttccggcgcgcgggataataccgctt

SEQ ID NO: 35250 - DNA, 260 bp, Unknown
  Description of Unknown: RightRegion for integrase B9251 sequence
ctcaaaataaaagaaatccggctatacaaagaccgccggattgaatttgattttctgtaagtacttagtttatataacccgttaggttatagcaaactaagtacacaagagtatcccccgccaaaacaggcgggggatactttatcctcgcatttttcgcatcacgttatcatacattcgcgcattggttactttcagcgcatccatcaactcgtccactatggcccacgcctgttccggcgcgcaggatgataccgctt

SEQ ID NO: 35251 - DNA, 260 bp, Unknown
  Description of Unknown: RightRegion for integrase B9252 sequence
caaattattgactatatagactttgacgctgatttaaagcccattatacattttaaatagcttgtactataggcaacacttctaaaggtaaggcttgtaagagctccggtacgagtacggccctatcggcatataaagcctcatgagccaagcctttcttcacctgccgcgtaaccagcgatacaaccgccacattggtcacttcactacccgtgccgcacgttgaaggcaccagaatgagctcactgcctttacaaggc

SEQ ID NO: 35252 - DNA, 260 bp, Unknown; identical to SEQ ID NO: 35244
  Description of Unknown: RightRegion for integrase B9253 sequence

SEQ ID NO: 35253 - DNA, 260 bp, Unknown
  Description of Unknown: RightRegion for integrase B9254 sequence
ctcaaaataaaagaaatccggctttacaaagatcgccggattgaatttgattttctgtaagtacttagtttatataaccctttaggttacagaaaaccaagtacacaagaatatcccccgcctaaacaggcgggggatactttatcctcgcatctttcgcattacgttatcatacattcgcgcattggttactttcagcgcatccatcaactcgtccactatggcccacgcctgttccggcgcgcgggatgataccgctt

SEQ ID NO: 35254 - DNA, 260 bp, Unknown
  Description of Unknown: RightRegion for integrase B9255 sequence
ctcaaaataaaagaaatccggctatacaaagacagccggattgaattcgattttctctaaaaacttagttagacgtaacctgacggttgcgtccatctaagtacacggcaatatcccccgcccaaacaggcgggggatcgcttatcctcgcatctttcgcatcacgttatcatacattcgcgcattggttactttcagcgcatccatcaactcgtccactatggcccacgcctgttccggcgcgcgggatgataccgctt

SEQ ID NO: 35255 - DNA, 260 bp, Unknown
  Description of Unknown: RightRegion for integrase B9256 sequence
tggagaaaatatatagaccgaatttactttgacgggcataactttaaagtggtgtactaataatatagcaccggttggttaacatctattagtacacacagaaaaacgaagaggacttgaaaatataacgagccctcttttgtttttacttctcaataaggaagtcgtttaagtcatctcgtacatgcttaagttggtcaatgccattaccagtaattgtgtgattgattatgacataaagactttttatgattacttta

SEQ ID NO: 35256 - DNA, 260 bp, Unknown
  Description of Unknown: RightRegion for integrase B9257 sequence
ctcaaaataaaagaaatccggctatacaaagaccgccggattgaatttgactttctgtaattacttagtttatataatccgttaggttgcataaaactaagtacacaagaatatcccccgccaaaacaggcgggggatactttatcctcgcatctttcgcatcacgttatcatacattcgcgcgttggtcactttcagcgcatccatcaactcgtccactatggcccacgcctgttccggcgcgcgggaagataccgctt

SEQ ID NO: 35257 - DNA, 260 bp, Unknown
  Description of Unknown: RightRegion for integrase B9258 sequence
ctcaaaataaaagaaatccggctatacaaagacagccggattgaattcgattttctctaaaaacttagttagacgtaacctgacgcatgtgggcgtttttgcggtcgatttcagccggatagacacaggcaaaaccgtgtgttttcttgtgtcaggcggcctttcgactgttcttttttgattcttcttaatacgccacgccccagtagatgtcggtggtgcacgccttgccgcacaccacgcacttgccggtggtgccg

SEQ ID NO: 35258 - DNA, 109 bp, Unknown
  Description of Unknown: RightRegion for integrase B9259 sequence
ctcaaaataaaagaaatccggctttacaaagatcgccggattgaatttgattttctgtgagtacttagtttatataatccttttcccacggtaaggtatactgagaggc

SEQ ID NO: 35259 - DNA, 260 bp, Unknown
  Description of Unknown: RightRegion for integrase B9260 sequence
ctcaaaataaaagaaatccggctatacaaagaccgccggattgaatttgactttctgtaagtacttagtttatataatccgttaggttacagaaaactaagtacacaagaatatcccccgccaaaacaggcgggggatactttatcctcgcatctttcgcattacgttatcatacatccgcgcattggtcactttcagcgcgtccatcaactcgtccactatggcccacgcctgttccggtgtgcgggatgataccgctt

SEQ ID NO: 35260 - DNA, 260 bp, Unknown
  Description of Unknown: RightRegion for integrase B9261 sequence
ctcaaaataaaagaaatccggctatacaaagacagccggattgaattcgattttctctaaaaacttagttagacgtaacctgacggttgcgtccaactaagtacacggcaatatcccccgcccaaacaggcgggggatcgcttatcctcgcatctttcgcatcacgttatcatacattcgcgcattggttactttcagcgcatccatcaactcgtccactatggcccacgcctgttccggcgcgcgggatgataccgctt

SEQ ID NO: 35261 - DNA, 260 bp, Unknown
  Description of Unknown: RightRegion for integrase B9262 sequence
ctcaaaataaaagaaatccggctatacaaagaccgccggattgaatttgactttctgtaagtacttagtttatataaccctttaggttacagtaaactaagtacacaagaatatcccccgccaaaacaggcgggggatactttatcctcgcatctttcgcatcacgttatcatacattcgcgcgttggttactttcagcgcatccatcaactcgtccactatggcccacgcctgttccggcgcgcgggatgatactgctt

SEQ ID NO: 35262 - DNA, 260 bp, Unknown
  Description of Unknown: RightRegion for integrase B9263 sequence
ctcaaaataaaagaaatccggctatacaaagaccgccggattgaatttgattttctgtaaatacttagtttatataaacctttaggttacagcaaactaagtacacaggaatatcccccgccaaaacaggcgggggatactttatcctcgcatctttcgcatcacgttatcatacattcgcgcattggttactttcagcgcatccatcaactcgtccactatggcccacgcctgttccggcgcgcgggatgataccgctt

SEQ ID NO: 35263 - DNA, 260 bp, Unknown
  Description of Unknown: RightRegion for integrase B9264 sequence
ctcaaaataaaagaaatccggctatacaaagaccgccggattgaatttgattttctgtaagtacttagtttatataaacctttaggttacagcaaactaagtacacagaagtatcccccgccaaaacaggcgggggatactttatcctcgcatctttcgcatcacgttatcatacatccgcgcgttggtcactttcagcgcgtccatcaactcgtccactatggtccacgcctgttccggtgtgcgggatgataccgctt

SEQ ID NO: 35264 - DNA, 260 bp, Unknown
  Description of Unknown: RightRegion for integrase B9265 sequence
ctcaaaataaaagaaatccggctatacaaagaccgccggattgaatttgattttctgtaagtacttagtttatataaacctttaggttacacaaaactaagtacacaagagtatcccccgccaaaacaggcgggggatactttatcctcgcatctttcgcatcacgttatcatacattcgcgcattggttactttcagcgcatccatcaactcgtccactatggcccacgcctgttccggcgcgcgggatgataccgctt

SEQ ID NO: 35265 - DNA, 260 bp, Unknown
  Description of Unknown: RightRegion for integrase B9266 sequence
cttaaaataaaggaaatccggctatacaaagaccgccggattgaatttgattttctgtaagtacttagtttatataacccttttcccaaggtgcggtataccgagcgtccggacgtggccacggcgtgtatcatggagggcgatgtggtggtgctggtggacaattcagcgtcggccctgctgctgcccacaacgatcctgcggttcaacgaggagatcaacgactactacttcccgcccctcatcggcacgtatctgca

SEQ ID NO: 35266 - DNA, 260 bp, Unknown
  Description of Unknown: RightRegion for integrase B9267 sequence
ctcaaaataaaagaaatccggctatacaaagaccgccggattgaatttgattttctgtaagtacttagtttatataaacctttaggttatacaaaactaagtacacaagaatatcccccgccaaaacaggcgggggatactttatcctcgcatctttcgcatcacgttatcatacattcgcgcattggtcactttcagcgcatccatcaactcgtccactatggcccacgcctgttccggcgcgcgggatgataccgctt

SEQ ID NO: 35267 - DNA, 260 bp, Unknown
  Description of Unknown: RightRegion for integrase B9268 sequence
ctcaaaataaaagaaatccggctttacaaagatcgccggattgaatttgacttcctgtaagtacttagtttatataaacctttaggttacagcaaactaagtacacaagaatatcccccgcctgttttggcgggggatactttatcctcgcatctttcgcatcacgttatcatacattcgcgcattggttactttcagcgcatccatcaactcgtccactatggcccacgccttttccggcgcgcgggatgataccgctt

SEQ ID NO: 35268 - DNA, 260 bp, Unknown
  Description of Unknown: RightRegion for integrase B9269 sequence
aagagcaaggaagatgtgacggtggtgttcaaagacggcaccgaaatgaaagcagaataaggtatgaagcagatacgacactcaggatttatgtcctgggtgtttttgctatgtgtacaaagtgcaaatttcgagatgagttcattgaagtgaaagcaaagatgtgttataatattatccgattagtgttattttacaaatttcagatgaggtgatacgaatgctgaaaaataatatagaagtagatgtaaaaatcaagt

SEQ ID NO: 35269 - DNA, 260 bp, Unknown; identical to SEQ ID NO: 35261
  Description of Unknown: RightRegion for integrase B9270 sequence

SEQ ID NO: 35270 - DNA, 260 bp, Unknown
  Description of Unknown: RightRegion for integrase B9271 sequence
aagagcaaggaagatgtgacggtggtgttcaaagacggcaccgaaatgaaagcagaataaggtatgaagcagatacgacactcaggatttatgtcctgggtgtttttgctatgtgtacaaagtgcaaatttcgagatgagtacattgaagtgaaagcaaagatgtgttataatattatccgattagtgttattttacaaatttcagatgaggtgatacgaatgctgaaaaataatatagaagtagatgtaaaaatcaagt

SEQ ID NO: 35271 - DNA, 109 bp, Unknown
  Description of Unknown: RightRegion for integrase B9272 sequence
ctcaaaataaaagaaatccggctatacaaagacagccggattgaattcgattttctctaaaaacttagttagacgtaacctgacgcatgtgggcgtttttgcggtcgat

SEQ ID NO: 35272 - DNA, 109 bp, Unknown; identical to SEQ ID NO: 35247
  Description of Unknown: RightRegion for integrase B9273 sequence

SEQ ID NO: 35273 - DNA, 260 bp, Unknown
  Description of Unknown: RightRegion for integrase B9274 sequence
ctcaaaataaaagaaatccggctatacaaagatagccggattgaattcgattttctctaaaaacttagttagacgtaacctgacggttacaaccaactaagtacacaagaaaatccccccgccaaaacaggcggggggatactttatcctcgcatctttcgcataacgctgtcatacacccgcgaatttgtcactttgagtgcgtccatcaactcatccataatgctccacgcttttcctgcatcacaagccatcaccgc

SEQ ID NO: 35274 - DNA, 260 bp, Unknown
  Description of Unknown: RightRegion for integrase B9275 sequence
ctcaaaataaaagaaatccggctatacaaagaccgccggattgaatttgattttctgtaagtacttagtttatataaacctttaggttacacaaaactaagtacacaagaatatcccccgccaaaacaggcgggggatactttatcctcgcatctttcgcatcacgttatcatacattcgcgcattggttactttcagcgcatccatcaactcgtccactatggcccacgcctgttccggcgcacgggatgataccgctt

SEQ ID NO: 35275 - DNA, 260 bp, Unknown
  Description of Unknown: RightRegion for integrase B9276 sequence
aatttgattgatcatatagtcgtccacaaagacaattcgcttgatatttaccttctttaactgtgtggataatccattgttattttttccctacaaagtacattaaactcaagtagtccatttgggcatcgatcttgtccttcttttaaatatccttcattaatcaattcctgtacacttgtaggtgtcgttagattatctatttcatataagataatttgtgaatcaacaatatctaaaagagcctgacaccctttatc

SEQ ID NO: 35276 - DNA, 260 bp, Unknown; identical to SEQ ID NO: 35260
  Description of Unknown: RightRegion for integrase B9277 sequence

SEQ ID NO: 35277 - DNA, 260 bp, Unknown
  Description of Unknown: RightRegion for integrase B9278 sequence
tggagaaaatatatagaacgaatttactttgatgggcataactttaaagtggtgtactaataatatagcaccggttggatttgactcaaaaaaagaattttctttaatggaaaaagctttctatgcccaaaaacactgtaaagaatatttagaatctggtgttacctttattcgtgcagtaggtacagaagaaaactatgacctacaaattaaagaggccattgacaaccatgtgattgaaggacctcatatgtattgtg

SEQ ID NO: 35278 - DNA, 260 bp, Unknown
  Description of Unknown: RightRegion for integrase B9279 sequence
caaattattgactatatagactttgatgctgatttaaagcctattatacattttaaatagcttgtactacaggcaacacttctaagggtaaggcttgtaagagttccggtatgagtacggccctatcggcatacaaggcctcgtgagccaagccttttttcacctgtcgcgtaaccagcgatacgaccgctacattggtcacttcactacccgtgccgcacgttgaaggcaccataatgagttcgctgcctttacaaggc

SEQ ID NO: 35279 - DNA, 260 bp, Unknown
  Description of Unknown: RightRegion for integrase B9280 sequence
ctcaaaataaaagaaatccggctttacaaagatcgccggattgaatttgacttcctgtaagtacttagtttatataaacctttaggttacagaaaactaagtacacaagaatatcccccgcctgttttggcgggggatactttatcctcgcatctttcgcatcacgttatcatacattcgcgcattggttactttcagcgcatccatcaactcgtctactatggcccacgcctgttccggcgcgcgggatgataccgctt

SEQ ID NO: 35280 - DNA, 82 bp, Unknown
  Description of Unknown: RightRegion for integrase B9281 sequence
ctcaaaataaaagaaatccggctatacaaagaccgccggattgaatttgattttctgtaagtacttagtttatataaacctt

SEQ ID NO: 35281 - DNA, 260 bp, Unknown
  Description of Unknown: RightRegion for integrase B9282 sequence
ctcaaaataaaagaaatccggctttacaaagatcgccggattgaatttgatttcctgtgagtacttagtttatataatcctttaggttacagcaaactaagtacacatagcccctctgccaattcaggcagaggggctactttagttattcagcttccgcataacgctgtcatacacccgcatgtttgtaaccttgagtgcgtccatcaactcgtccattacgcccaacgcttttcctgcatcacaacccattattgccc

SEQ ID NO: 35282 - DNA, 260 bp, Unknown
  Description of Unknown: RightRegion for integrase B9283 sequence
tggagaaaatatatagaacgaatttactttgacgggcataactttaaagtggtgtactaataatatagcgccggtcggattcgactcaaaaaaagaatttagcttaatagaaaagatattctatgcacaaaagcactgtagagaatatcttcaatctggagtaacatttattcgtgttgtaggcacggaagaaaattatgatctacaaattaaagaagccattcaaaatgatgtgattcaaggccctcatatgtattgtg

SEQ ID NO: 35283 - DNA, 260 bp, Unknown
  Description of Unknown: RightRegion for integrase B9284 sequence
cttaaaataaaggaaatccggctatacaaagaccgccggattgaatttgattttctgtaagtacttagtttatataaccctttaggttacgcagaactaagtacacaagagtatcccccgccaaaacaggcgggggatactttatcctcgcatctttcgcatcacgttatcatacattcgcgcattggttactttcagcgcatccatcaactcgtccactatggcccacgcctgttccggcgcgcgggatgataccgctt

SEQ ID NO: 35284 - DNA, 260 bp, Unknown
  Description of Unknown: RightRegion for integrase B9285 sequence
ctcaaaataaaagaaatccggctatacaaagaccgccggattgaatttgattttctgtaagtacttagtttatataaaccgtttcccaaggtccggtatacggagcgccctgacgtggccacggcctgcatcatggagggcgacgtggtggtgatggtggacaactccccgtcggcgctgctgctgcccaccacgctgctgcggttcaccgaggagatcaacgactactacttcccgcccctcattggctcctatctcca

SEQ ID NO: 35285 - DNA, 260 bp, Unknown
  Description of Unknown: RightRegion for integrase B9286 sequence
ctcaaaataaaagaaatccggctatacaaagaccgccggattgaatttgactttctgtaagtacttagtttatataatccgttaggttacagcaaactaagtacacaagaatatcccccgcctgtttgggcgggggatactttatcctcgcatctttcgcatcacgttatcatacatccgcgcattggttactttcagcgcatccatcaactcgtccactatggcccacgcctgttccggcgcgcgggatgacaccgctt

SEQ ID NO: 35286 - DNA, 260 bp, Unknown
  Description of Unknown: RightRegion for integrase B9287 sequence
ttgaaaataaaagaaatccggctctacgaagatcgccggattgaatttgattttctttgactacatagttttgcataaccatgtggttgcgcaaaataatgtatacgaaagtatcccccgccaaaacaggcgggggatactttatcctcgcatctttcgcatcacgttatcatacattcgcgcgttggtcactttcagcgcatccatcaactcgtccactatggcccacgcctgctccggtgcgcgggatgataccgctt

SEQ ID NO: 35287 - DNA, 260 bp, Unknown
  Description of Unknown: RightRegion for integrase B9288 sequence
gtgaacagggacggcagcattacattacgcttcgttagcggcgcagagataaccgtataaaaacagcaatgcccacaggttttgacggtctgtgggctttttcccgttgtgggaacttattacgagtgatttcgacaaacgggctatgttaccacaccgttaggctgaacgccaaatacatttcaccaagcgtggaaaaaggagtcaaattatgtcgaactacaaaaacaacaaacaggtcatggaagcaggcagacgcg

SEQ ID NO: 35288 - DNA, 260 bp, Unknown
  Description of Unknown: RightRegion for integrase B9289 sequence
agaattctaaaaaaaatcgtcatcacacaaaatgatgactttttaattgaaccgtattagccatttttgcattaacagacggggaattgggccggcaaaacggtggacgtggcgcgcggccgcttttcccatcgcggcgcggaatatcgtttgatcgacctgcccggcatgtgctcgatgaaaagcgacagcgccgaggaaaagctggcgcgcgacttcatcgccttcgagccgattgacgcggccgtcgtcgttgccga

SEQ ID NO: 35289 - DNA, 260 bp, Unknown
  Description of Unknown: RightRegion for integrase B9290 sequence
ttgaaaataaaagaaatccggctctacgaagatcgccggattgaatttgattttctttgactacatagttttacataaccatgtggttgcacaaaataatgtatacgaaagtatcccccgcctattttggcgggggatactttatcctcgcatctttcgcatcacgttatcatacattcgcacgttggtcactttcagcgcatccatcaactcgtccactatggcccacgcttgttcaggcgcacgggatgataccgctt

SEQ ID NO: 35290 - DNA, 260 bp, Unknown
  Description of Unknown: RightRegion for integrase B9291 sequence
cgaagcttgatagatcatattgatgtaagtggcgatatgcctgttattttttttaaataaaacttgtagtaactcatcggcaccgtccggcagcttcggttcaaactgcaagtacgccttgccttcactgtccttctcggccagtgcggccacgctgtccggatacttgcctttatcgatttcatagagagccgccgcattgtcgatggtacgaatatccgcactgattttagcgagctttgccgtcttgccggcggaca

SEQ ID NO: 35291 - DNA, 260 bp, Unknown
  Description of Unknown: RightRegion for integrase B9292 sequence
cgcaccatcaagcgcattgacgccgacaacaatggcgcattttttgtaaccacgcgttaggcacagtttacactgccgctatatagcgtcaactatacccaactcccccagccgctttggctgggggagttttcttcacttcgcgatagcgcaatagtacgccgccagtttcgctttcggttccggcgcatccttatcccacaaaaacgcctttgccaagtccccgtaaaactcagccgtaaaaacgccgtgccgctccg

SEQ ID NO: 35292 - DNA, 260 bp, Unknown
  Description of Unknown: RightRegion for integrase B9293 sequence
cgcaccatcaagcgcattgacgccgacaacaatggcgcattttttgtaaccacgcgttaggcatagtttacactgccgctatgtagcgttaactatacctaactcccccagccgatttggctgggggagttttcttcacttcgcaatagcgcaatagtacgccgccagtttcgcttttggttccggcgcatccttatcccacaaaaacgcctttgccaagtccccgtaaaactccgccgtaaacacaccgtgccgttctg

SEQ ID NO: 35293 - DNA, 260 bp, Unknown
  Description of Unknown: RightRegion for integrase B9294 sequence
cgtactgtccggcggatcgatatcacaaatgaagatgttttttctgttactcctatttagccatataacaactaacctgtatgttaattataatatggctaaataaaaagcccccaggaaaattcccgggggctgtctttctgtcaatcgcttttcttaggttcggtataagaaagcgcctggctggaatcgcttaggccgcttgtggtggggtcgtttaacaggttccatacagataccagaacagacaccacgattac

SEQ ID NO: 35294 - DNA, 260 bp, Unknown
  Description of Unknown: RightRegion for integrase B9295 sequence
cgtactgtccggcggatcgatatcacaaatgaagatgttttttctgttactcctatttagccatataacaactaacctgtatgctgatttaagccggttaaggcgttaaagacggtgctttttccaacgttaggattgccggctaatgcgatgaccttttcctggtcagaggattttacaattgcgggaatgtcgccggacgcagcgctgcgtgtggattgttttgtcaggcccatggtcaattcccctttcttaccgct

SEQ ID NO: 35295 - DNA, 260 bp, Unknown
  Description of Unknown: RightRegion for integrase B9296 sequence
atttctactcacacatcccgtgtgggatgtgacagctaccacctaaagcaaatccgatgattgcagcatttctactcacacatcccgtgtgggatgtgacttccataattacactcctaacacatatcttagtacaatttctactcacacatcccgtgtgggatgtgactacagtacttgctttttgacggattaacacaggagcatttctactcacacatcccgtgtgggatgtgaccagttagatgtattaagggtgg

SEQ ID NO: 35296 - DNA, 260 bp, Unknown
  Description of Unknown: RightRegion for integrase B9297 sequence
ggaattataaaaaaaataattgtttccaagaacggcgtggagaatgtcgtttttatttaaagcatgtattatctttatgaatcattattggtagataagtattcataaagataattacaaaggaataatataagtcaacaaaacgtacaatgtacgttaatatcctcactatacatggcgtacattgtgcgctataatgtaatcatagtcaagtaaggaggttgcaatggagatcaaagagatgcggatcctgcttgggg

SEQ ID NO: 35297 - DNA, 260 bp, Unknown
  Description of Unknown: RightRegion for integrase B9298 sequence
cgcaccatcaagcgcattgacgccgacaacaatggcgcattttttgtaaccacgcgttaggcatagtttacactgccgctatatagcgtcaactacgcccaactcccccagccaaagcggctgggggagttttcttcacttcgcgatagcgcaatagtacgccgccagtttcgctttcggttccggcgcatccttatcccacaaaaacgcctttgccaagtccccgtaaaactcagccgtaaaaacgccgtgccgctccg

SEQ ID NO: 35298 - DNA, 260 bp, Unknown
  Description of Unknown: RightRegion for integrase B9299 sequence
cgcaccatcaagcgcattgacgccgacaacaatggcgcattttttgtaaccacgcgttaggcatagtttacactgccgctatgtagcgttaactacacccaactcccccagccgctttggctgggggagttttcttcacttcgcgatagcgcaatagtacgccgccagtttcgctttcggttccggcgcatccttatcccacaaaaacgcctttgccaagtccccgtaaaactcagccgtaaaaacgccgtgccgctccg

SEQ ID NO: 35299 - DNA, 260 bp, Unknown
  Description of Unknown: RightRegion for integrase B9300 sequence
cgcaccatcaagcgcattgacgccgacaacaatggcgcattttttgtaaccacgcgttaggcacagtttacactgccgctatgtagcgttaactatacccaactcccccagccgatttggctgggggagttttcttcacttcgcaatagcgcaatagtacgccgccagtttcgcttttggttccggcgcatccttatcccacaaaaacgcctttgccaagtccccgtaaaactccgccgtaaacacgccgtgccgttctg

SEQ ID NO: 35300 - DNA, 260 bp, Unknown
  Description of Unknown: RightRegion for integrase B9301 sequence
cgcaccatcaagcgcattgacgccgacaacaatggcgcattttttgtaaccacgcgttaggcacagtttacactgccgctatgtagcgttaactatacccaactcccccagccgatttggctgggggagttttcttcacttcgcaatagcgcaatagtacgccgccagtttcgcttttggttccggcgcatccttatcccacaaaaacgcctttgccaagtctccgtaaaactcagccgtaaaaacgccgtgccgctccg

SEQ ID NO: 35301 - DNA, 260 bp, Unknown
  Description of Unknown: RightRegion for integrase B9302 sequence
cgcaatgctcttgattctgtacatgtttcccctgacgaaatagaagttttcttcaagtaaaaagcagacatttctgcctgccctttactaggagaattttatgaccaatgtaaacgaaagtacatctataatatacaccagaaaatcgccgaatgcaaacggtgattttttctttactaacattatgcgacctgtaggctatgacaagttagtatagaattttgtgcataaaaaaacagcccgccgaaaaccttcgacag

SEQ ID NO: 35302 - DNA, 260 bp, Unknown
  Description of Unknown: RightRegion for integrase B9303 sequence
agttttataaaggaaattaaaatagaccatgaatgtaatgtgaaattaaaatttcactaatcatggtcatatataactatatttctttgttgtttatccttttagctaaatccttaacctttttttctatttctaatgcgcaacttattattttttgtttgttaccagttggtaacgatatattaataataagtttttattgctatatttaactttacttctaacaattacatttgaaaataagctttatctaactttat

SEQ ID NO: 35303 - DNA, 260 bp, Unknown
  Description of Unknown: RightRegion for integrase B9304 sequence
agagaaaaggcaaggcaaagggctaaagcgcattacaagaaagaaggagctgatgaataatggcaaaagtaacaataataccttcaaagattaatccaattacacatcagcatcttgatgttaaagtaaagagaagggttgcagcatatgcacgtgtttcaaccgatgacgagatgcaattaacttcatatgaagcgcaagttgattattatacaaagctaataaaggccaatgatgaatgggaatttgtcaaagtatat

SEQ ID NO: 35304 - DNA, 182 bp, Unknown
  Description of Unknown: RightRegion for integrase B9305 sequence
tttatatcatctatagaagttctcccggataagaccctgaacataaaaataggacactaagcgtgccctattcctcatcctcgtatggattgcgtcctgtaatttgttcgcatactgcctccgcaacattagttgcatatgcactatgctaatattattatttttctttcctacatctattt

SEQ ID NO: 35305 - DNA, 260 bp, Unknown
  Description of Unknown: RightRegion for integrase B9306 sequence
atgaaggaaaccgcacggcaaagaacactgcaacgctacgcatcgaaagaggtggaatgatggcaagagaagtaagagtaatccctgcaagtgtacacaaatttacgaccgttcctttcggctctactgtaaggaaaaaggtcgcaggctacgctcgtgtgtctacagaccttgaagaacagctcaccagctacgaggcgcaggtggattactacaccaagtacattcagaataatcccgattgggactttgttgaggtg

SEQ ID NO: 35306 - DNA, 260 bp, Unknown; identical to SEQ ID NO: 35189
  Description of Unknown: RightRegion for integrase B9307 sequence

SEQ ID NO: 35307 - DNA, 260 bp, Unknown
  Description of Unknown: RightRegion for integrase B9308 sequence
tcgtttgttgaatcggtgctggtgtatgaggatggaagcatggacattcgttttttgtagtctttgtcgtactaactatgcaccgcctgtcggctcatcagccaaaataatatctggatcagaaatcaagctgcgggctgcggctacacgctgcttttgaccgccggacatttgcgccggaaactttgaaagaacatcagtaattccaagaaatccggctatatcatttaggtgcttttcggctatggaactatctatat

SEQ ID NO: 35308 - DNA, 260 bp, Unknown
  Description of Unknown: RightRegion for integrase B9309 sequence
cgcttcatcaagcggattgatgcagacaacgatggcgcgtttttcgtaatgccgcgttaggcatattttacctttgcggacacaaagggtaagtatgcctaaaaatcccccgccgtaaatgacgggggattttttacctatcgagtttacgcatgacgctgttgtagacgcgctcgttaacaactttcaaactgtccatcagttcgtccataaccgcccatgccacacttggatcaacagctgatacggcccgcagaaag

SEQ ID NO: 35309 - DNA, 260 bp, Unknown
  Description of Unknown: RightRegion for integrase B9310 sequence
aaacgggctgccgctgctaaatcatcaaaaacaaggagatggagaaaatgccaaaagtaacaaaaattccgccaagattaaatcctgccacttttgcacctttggagagtgttgaaaaacgaaaagttgcaggatatgcaagagtttcaactgattcagaagaacaaaaaacttcctatactgcccaagtggattactatacgaaattcattaaagaacggatcgattgggaatttgtcggagtttatacagatgaaggc

SEQ ID NO: 35310 - DNA, 260 bp, Unknown
  Description of Unknown: RightRegion for integrase B9311 sequence
gaaatgcggaaaaaagccgctgagcatagcaagaaaagaggtaagaaatgtcaagagtaacagttattccggcaaaacttgatagggctacattcatgccgctggataagcccataaagcgcagagtagccggatatgcacgagtttcgacagactccgaggaacagcagacctcctacgaagcacaggtatcctactacacagagtacatccagaagcgtgatgactgggagtttgcaggcgtgtatacggatcaagga

SEQ ID NO: 35311 - DNA, 260 bp, Unknown
  Description of Unknown: RightRegion for integrase B9312 sequence
tttatatcatctatagaagttctccccgataagaccctgaacataaaaataggacactaagcgtgccctattcctcatccgcgtatggattgtgacctgtaatttgttcgcatactgcttccgcaacattagttgcatatgcactatgctaatatattatttttctttcctacatctatttgaattatgacaatatcctgtgaaatgtaagtaattgatatgttatatgtttgtaaaatttataataccctcatggcact

SEQ ID NO: 35312 - DNA, 260 bp, Unknown
  Description of Unknown: RightRegion for integrase B9313 sequence
aaacgtgctgccgctgctgaatcatcaaaaacaaggagatggagaaaatgccaaaagtaacaaaaattccgccaagattaaatcctgccacttttgcacctttggagagtgttgaaaaacgaaaagttgcaggatatgcaagagtttcaactgattcagaagaacaaaaaacttcctatactgctcaagtggattactatacgaaattcattaaagaacggatcgattgggaatttgtcggagtttatacagacgaaggc

SEQ ID NO: 35313 - DNA, 260 bp, Unknown; identical to SEQ ID NO: 33843
  Description of Unknown: RightRegion for integrase B9314 sequence

SEQ ID NO: 35314 - DNA, 260 bp, Unknown
  Description of Unknown: RightRegion for integrase B9315 sequence
gcaagaagaaaggcggttgaaatacatggcaaaagtaacagtaatcccatcaacgattaatccaattactaaattacctaataatggtttacaaaaaagaaaagttgcaggttatgctagagtttcaacgattttagatgagcagtgttcttcatatcaagcacaagtcgattactatacaaacttaataaaaagaaatccagaatgggaatttgtcgaagtatatgctgatgaaggcatatcaggaacaaatacaaaaa

SEQ ID NO: 35315 - DNA, 260 bp, Unknown
  Description of Unknown: RightRegion for integrase B9316 sequence
gatggcagactgcagataagattttatgatggaacagaatttgagttgacagcagaataaggcaaaaggatcggtaggtgaatcagtaggatttgcttaccggcttttttgctttataagaataatactacattttaatgctacaaaattattgacaaaacaaaaaaagtagtaataaaatgtagtaaaaggagggctaaatgaaaacatatagtgttaaggaaattgcagaacttttaaatacaaatcctgaaactgta

SEQ ID NO: 35316 - DNA, 260 bp, Unknown
  Description of Unknown: RightRegion for integrase B9317 sequence
aatcaaaatgagctggaatttcacttgatcggtggattagaacttgcggaggaaatatgatcttggtgtcttgtataccaaattgcagggcattttatgttggtattgatactggatttttgcaaagctttgtggtatcattgtcggttgaaaggagtgagtttatgcctaaaaacagaataatcccattcggttactgtatgaaaaacggtgagataataaccgagcccaacgagctctataccgttgttacaatattt

SEQ ID NO: 35317 - DNA, 260 bp, Unknown
  Description of Unknown: RightRegion for integrase B9318 sequence
gatggtaggcttcagataaagttttataacgggacagagtttgaagtagaaactgaataaggaagtaaaatggccggtaggtgaatcgcagtgatttgcttaccggctttttttgcgttagaaatagtgcttgctatgtgttcgatatatggtcaatagtataatgcccggactaaaagaaaaaccagataacgaaaggttttgaaaggagggagacagaaattggtctggagaatttatgaaaggaagtggtcaatttg

SEQ ID NO: 35318 - DNA, 260 bp, Unknown
  Description of Unknown: RightRegion for integrase B9319 sequence
aaaacagtcaaaaaaatctatttatctagcgattcagtggccgattttgatttaatctaagccgttatataatatgattaaaccgtcaggttttatcatattatataacgcataaaatgagccccagaaactggggctcatttgctacactgcgtctattttccgcataacgctattgtacactcttgtgttgactactttgagcgtgtccattaactcatccatgatatcccacaccgacgcagggtctttgccctcca

SEQ ID NO: 35319 - DNA, 260 bp, Unknown
  Description of Unknown: RightRegion for integrase B9320 sequence
aaaacagtcaaaaaaatctatttatctagcgattcagtggccgattttgatttaatctaagccgttatataatatgataaaacctgacggttttattatattatataacgcataaaatgagccccagaaaactggggctcatttgctacactgcgtctattttccgcataacgctattgtacactcttgtgttgactactttgagcgtgtccattaactcatccatgatatcccacaccgccgcagggtctttgccctcc

SEQ ID NO: 35320 - DNA, 260 bp, Unknown
  Description of Unknown: RightRegion for integrase B9321 sequence
cgcacaatccagcgcattgatgctgataatgacggtgcgttttttgtaacgcctcgttaggcatattttacgttgcggttagtcacagtgaaatatgcctaaaatcccccgcctttgtagacgggggatttctcatatagcctgaagttttcgcatgacattatcatagacctttctgtttaccactttcaaggtgtccaacagttcatccatgatttcccatgctttttctgggtctttaccatcgacagctctcaaaa

SEQ ID NO: 35321 - DNA, 260 bp, Unknown
  Description of Unknown: RightRegion for integrase B9322 sequence
cgcacaatccagcgcattgatgctgataatgacggtgcgttttttgtaacgcctcgttaggcatattttacgttgcggttggtcacagtaaaatatacctaaaatcccccgcctttgcagacgggggatttctcatatagcctgaagttttcgcatgacattatcatagacttttctgtttaccactttcaaagtgtccaacagttcatccatgatttcccatgctttttcagggtctttaccctcgacagctctcaaaa

SEQ ID NO: 35322 - DNA, 260 bp, Unknown
  Description of Unknown: RightRegion for integrase B9323 sequence
aaaacagtcaaaaagatctatctatccaacgattcagtggccgattttgatttaatctgaaccgttgtataatctataataaccggacggtttaatcatattatataacgcataaaattagccccagtttctggggctaatttgctacactgcgtctattttccgcataacgctattgtacactcttgtgttgactactttgagcgtgtccattaactcatccatgatatcccacaccgccgcagggtctttgccctcca

SEQ ID NO: 35323 - DNA, 260 bp, Unknown; identical to SEQ ID NO: 35320
  Description of Unknown: RightRegion for integrase B9324 sequence

SEQ ID NO: 35324 - DNA, 260 bp, Unknown
  Description of Unknown: RightRegion for integrase B9325 sequence
ccggaaatgaaagagcaggccagacagcgggcattgcagacaaggagggtacaaaaatgagcaccgcgacagtccggtcggtcacgatcattccaccgaccatcaaccctttgacgcatatttctatggcggccactcggaaacggcgagtcgccgggtacgcaagagtgtccacagacagcgatgaacagttcaccagctatgaagctcaaatcgactactacacccaatacatccagcgtaattccgaatgggcgttc

SEQ ID NO: 35325 - DNA, 260 bp, Unknown
  Description of Unknown: RightRegion for integrase B9326 sequence
ccggaaatgaaagagcaggccagacagcgggcattgcagacaaggagggtacaaaaatgagcaccgcagcagtccggtcggtcacaatcattccaccaaccatcaacattctgacgcatctttctacggcgaccacccagaaaaggcgggtcgctgggtatgccagagtgtccaccgacagcgatgagcagttcaccagctatgaagcccaaatcgactactacacgcagtacatccggtgcaatccagaatgggagttc

SEQ ID NO: 35326 - DNA, 260 bp, Unknown
  Description of Unknown: RightRegion for integrase B9327 sequence
tgtgaggaaaaagaagttgttgagcttatttatttacataaagaaaaaaaagagggctgatgcccaaaatgattacaagtctatatatttatttacaaaaaagagtttaacataatcctagatcaatcggtatactatgatgagtagtgttgaatagcaaaaaaaaagaacaagtcgaacttgttctttttcttaacacatgttataatgtgtttgctagattacaagaaagattataacataagaatttgagattgcaa

SEQ ID NO: 35327 - DNA, 260 bp, Unknown
  Description of Unknown: RightRegion for integrase B9328 sequence
agaaatactcttggcaaaattttagtaggtgatactatttctttcactttcagaggatgatatatacttatgtgtcgtgaccgttctgtcacgacacataagtatattgcaacgaaaaaagccgccaacgtacggcgacttcttcggaaagtgtgtgtgtattcaataaagaaggaaagttcttttttaatacacaataattttataacaaactttattgtgtgtcaatagaaaaagcagggtttcccctgccttttcta

SEQ ID NO: 35328 - DNA, 260 bp, Unknown; identical to SEQ ID NO: 35004
  Description of Unknown: RightRegion for integrase B9329 sequence

SEQ ID NO: 35329 - DNA, 260 bp, Unknown
  Description of Unknown: RightRegion for integrase B9330 sequence
gaagaaatgaaagcagccgccaatcaaaaagcattagagaggaataagcacaatgcctaaagttaccatgattcctgcaaccataaatccgctgacgcacttgccaaaagaaaccacgcagaaaaggcgggttgccgggtacgcccgtgtttccaccgacagcgatgagcagttcacaagctacgaagcacaagtggactactacacaaaattcattcagtcaaagcctgaatgggatttcgtaaaggtctatacagacg

SEQ ID NO: 35330 - DNA, 260 bp, Unknown
  Description of Unknown: RightRegion for integrase B9331 sequence
gaaaaaaggcagaaagcggctgagcaagcacggaggcaccatgcaaagacaggtcgttaagcgcgaggtacaggtcatccagccgacgcttcggacagggctgatgcattccaccctcgctccggcaatcaagcagagggttgccgcctacgcccgtgtttcaaccgagcacgaggaacagcagagcagctatgaagctcaggtggattactacaccaggaagatcaaagagagatccgactggtcgtttgtggaggtgt

SEQ ID NO: 35331 - DNA, 260 bp, Unknown
  Description of Unknown: RightRegion for integrase B9332 sequence
agaacagtaaagcggattgaagcagacaataacggtgcgttttttgttttgcctcgttaggtatattttatgtttcctacactgaacattaaatatgcctaacaacccccgcctaaaaaggcgggggttgttttattcgagcttccgcataacgttgttataaatgcgctcattcacaactttcaggctgtccataagctcgtccatgatctcccacgccttttcctgtgagactttcgatacggcgcgtaagaaatcgc

SEQ ID NO: 35332 - DNA, 260 bp, Unknown
  Description of Unknown: RightRegion for integrase B9333 sequence
ctgcgcaccgtccagcgggtggtcatccatccggatcgacacccagagatcgtattctaagtctgattttttatcagaatttttcattgttattgaaacttctgctcagcgatatttgcacaacaatgagcaaataatccgatcttactggacaagccatcacaaagggaggatggcttatcatgcacaacattgaccaggtgatccgcagcatcagcggacactatgaccggcgctgctacgaggcgctgcatctggcg

SEQ ID NO: 35333 - DNA, 260 bp, Unknown
  Description of Unknown: RightRegion for integrase B9334 sequence
gacgagatgaaagaagccgcccgtcagaaaacattagaaaggagcaagcataatgcctaaagttacgatgataccggcgactgtaaattccttgacgcatctgccaaaggcatccgtgcagaaaaggcgtgttgccggatatgcccgagtttcaactgacagtgatgagcagttcacaagctatgaagcgcaggtggactactacacccgatacattcagtcaaagccggagtgggatttcgtaagggtctataccgatg

SEQ ID NO: 35334 - DNA, 260 bp, Unknown
  Description of Unknown: RightRegion for integrase B9335 sequence
agaacagtaaagcggatcgaagcagataataacggtgcgttttttgttttgcctcgttaggcttattttatattccccacactgaacattaaatatgcctaacaacccccgcctaaaaaggcgggggttgttttattcgagcttccgcataacgttgttataaatgcgctcattcacaactttcaggctgtccataagctcgtccatgatctcccacgccttttcctgtgagactttcgatacggcgcgtaagaaatcgc

SEQ ID NO: 35335 - DNA, 92 bp, Unknown
  Description of Unknown: RightRegion for integrase B9336 sequence
cgcttcatcaggcggattgacgcagacgacaacggcgcgtttttcgtaacgccgcgttaggcatattttaccttcacgtcggcgaaggggaa

SEQ ID NO: 35336 - DNA, 260 bp, Unknown
  Description of Unknown: RightRegion for integrase B9337 sequence
cgctttattcggagaattgacgcagatgacgacggcgcgttttttgtaacgccacgttaggcatatttgaccttcgtgttcccaaaggtaaactatgcccaaaaggacacccccgtcttgcgacgggggtgttctcatttttcgagcttccgcatcacgctgttgtacacgcgctcgttgacgattttaaggctgtccatcagctcgtccatgacctcccacgctcttgctggagccatgttagagacggcccgcaaaaa

SEQ ID NO: 35337 - DNA, 260 bp, Unknown
  Description of Unknown: RightRegion for integrase B9338 sequence
ctgcgcaccgtccagcgggtggtcatccatccggatcgacacccagagatcgtattctaagtctgattttttatcagaaattttcattgttaatgaaacttctgctcagcgatatttgcacaacaatgagcaaataatctgatcttactggacaagccatcacaaagagaggatggcttatcatgcacaacattgaccaggtgatccgcagcatcagtggacactatgaccggcgctgctacgaggcgctgcatctggcg

SEQ ID NO: 35338 - DNA, 260 bp, Unknown
  Description of Unknown: RightRegion for integrase B9339 sequence
ccggaaatgaaagaaaaggcaaggcaggcaacgacagaaaggtggagatcaaatggctaacgcaagaaaggtacaggtcatagaggcaacaatcaatcctaagacgcacctgtccactacatcgcctcgcaagcgccgtgtagcagcatacgcccgcgtctcgaccgattcggatgaacaggcaggcagctacgatgcacagattgattactataccaggtacatctgcaacagacctgattgggagttcgtaaaggttt

SEQ ID NO: 35339 - DNA, 260 bp, Unknown
  Description of Unknown: RightRegion for integrase B9340 sequence
caaaatttagattttacaagaggaaattccggcattagaggattttgcggcatatattagaaatccggtatttatgcaattttgctccgagattaaaaagaagtacaggtgcaatgagaaaatagaatttagccgttgtagttgggaacgtggttggaatgtaaaatttaaaaagtctggaaaaagcctgtgtaccgtatatcccagggaaggatattttacggtactggtggtggttggtgaaaaagaaaaagaagcag

SEQ ID NO: 35340 - DNA, 260 bp, Unknown
  Description of Unknown: RightRegion for integrase B9341 sequence
ctgcgcaccgtccagcgggtggtcatccatccggatcgacacccagagatcgtattctaagtctgattttttatcagaaattttcattgttaatgaaacttctgctcagcgatatttgcacaacaatgagcaaataatccgatcttactggacaagccatcacaaagagaggatggcttatcatgcacaacattgaccaggtgatccgcagcatcagcggacactatgaccggcgctgctacgaggcgctgcatctggcg

SEQ ID NO: 35341 - DNA, 260 bp, Unknown; identical to SEQ ID NO: 35333
  Description of Unknown: RightRegion for integrase B9342 sequence

SEQ ID NO: 35342 - DNA, 260 bp, Unknown
  Description of Unknown: RightRegion for integrase B9343 sequence
agaacagtaaagcggatcgaagcagataataacggcgcgttttttgttttgcctcgttaggcttattttatattccccacactgaacatctaatatgcctaacaccccccacctaaaaaggcggggggtgtcttattcgagtttccgcataacgttgttataaatgcgctcattcacaacctttaaactgtccataagctcgtccataacctcccatgcgcgggaggggtcaacgcttgccacagcccggaggaaatcac

SEQ ID NO: 35343 - DNA, 260 bp, Unknown
  Description of Unknown: RightRegion for integrase B9344 sequence
ctgcgcaccgtccagcgggtggtcatccatccggatcgacacccagagatcgtattctaagtctgattttttatcaaaaattttcattgttaacgaaacttctgctcagcgatatttgcacaacaatgagcaaataatccgatcttactggacaagccatcacaaagagaggatggcttatcatgcacaacattgaccaggtgatccgcagcatcagcggacactatgaccggcgctgctacgaggcgctgcatctggca

SEQ ID NO: 35344 - DNA, 260 bp, Unknown
  Description of Unknown: RightRegion for integrase B9345 sequence
ctgcgcaccgtccagcgggtggtcatccatccggatcgacacccagagatcgtattctaagtctgattttttatcagaatttttcattgttgaggaaacttttctgagaatatgtttgcacaacaatgagaaaagaatcaggccgacactggacaagccatctcaagagaggatggcttatcatgcacaacattgaccaggtgatccgcagcatcagtggacactatgaccggcgctgctacgaggcgctgcatctggcg

SEQ ID NO: 35345 - DNA, 260 bp, Unknown
  Description of Unknown: RightRegion for integrase B9346 sequence
agaacagtaaagcggatcgaagcagataataacggtgcgttttttgttttgcctcgttaggcttattttatattccccacactgaacatctaatatgcctaacaacccccacctaaaaaggcgggggttgtcttattcgagtttccgcataacgttgttataaatgcgctcattcacaacctttaaactgtccataagctcgtccataaccgcccatgcgcgggaggggtcaacgcttgccacagcccggaggaaatcac

SEQ ID NO: 35346 - DNA, 260 bp, Unknown
  Description of Unknown: RightRegion for integrase B9347 sequence
ccggaaatgaaagaaaaggcaagacgggcaacggcagaaaggtggaaagcaaatggctaatgcaagaaaagttcaggtcatagaggcaacaatcaatccgaaaacgcatctgtccaccacgtcgcctcgcaagcgccgtgtagcagcatacgcccgcgtctcgaccgattcggatgaacaggcaggcagctacgacgcacagatcgattattataccaggtacatctgtaacagacctgattgggagtttgtgaaggttt

SEQ ID NO: 35347 - DNA, 260 bp, Unknown
  Description of Unknown: RightRegion for integrase B9348 sequence
attcgccggattgtagtttcagaaaacggcgacatcttttttgaacttgtttggctataaagaaccttaacaccagttaacgtataatatggctaaataggggatgcactacgcatcccctaaaatatagtttactgctttttcagctttgccggcggcagagactgtcatggttggatcattttttagaactcgcatccagctttgaagatatgctgcactatttcggaaagaagctcttgtttctatcccaacatggg

SEQ ID NO: 35348 - DNA, 260 bp, Unknown
  Description of Unknown: RightRegion for integrase B9349 sequence
cgcacgatccagcgcatcgacgcagacaatgacggtgcgttttttgtaacgcccagttagttttattttcatgtcacaacgcctacgtcaaaatataactaaccccccggcatttgccgagggggttaagtttagctttccaatttccgcatgacgctattgtaaacccgctcattgaccactttcaagctgtccatcagctcgtccatgacctcccacgcacgggctgggtcaacgttggacactgcccggaggaattc

SEQ ID NO: 35349 - DNA, 260 bp, Unknown
  Description of Unknown: RightRegion for integrase B9350 sequence
attcgccggattgtgatttcagaaaacggcgacatcttttttgaacttgtttggctataaagaaccttaacacctgttatcgtataatatagctaaacaggggatgcattatgcatcccctaaaatatagtttactgctttttcagctttgccagcggcagagactatcatagttggatcattttttagaactcgcatccaaccttgaagatatgcagcgctatttcggaaagaagctcttgtttctatcccaacatggg

SEQ ID NO: 35350 - DNA, 260 bp, Unknown
  Description of Unknown: RightRegion for integrase B9351 sequence
cgctttatccggagaattgacgcagatgacgacggcgcgttttttgtaacgccacgttaggcatatttgaccttcgtgttcccaaaggtaaattatgcccaaaagaacacccccgccttacgacgggggtgttctcatttttccagcttccgcattacgctgttgtacacgcgctcgttgacgattttaaggctgtccatcagctcgtccatgacctcccacgctcttgccggagccatgtcggagacggcctgtaaaaa

SEQ ID NO: 35351 - DNA, 127 bp, Unknown
  Description of Unknown: RightRegion for integrase B9352 sequence
attcgccggattgtagtttcagaaaacggcgacatcttttttgaactcgtttggctataaagaaccttaacaccagttaacgtataatatagctaaacaggggatgcattatgcatcccctaaaata

SEQ ID NO: 35352 - DNA, 260 bp, Unknown
  Description of Unknown: RightRegion for integrase B9353 sequence
cgcttcatcaggcggattgatgcagacaacgatggcgcgtttttcgtaacgccccgttaggcatattttaccttcacggagtttaccgtatagccgaaatacttctgcagcgtctcgatgtcgccccggtcccatgccacctcgatggcgtgacggatggcccgttccacccgggatggggtagtacagaaccgtttggctacctccggatacagtacctttgtcacagcgttgatcacatccatgtcattcaccgcgat

SEQ ID NO: 35353 - DNA, 260 bp, Unknown
  Description of Unknown: RightRegion for integrase B9354 sequence
cgctttatccggagaattgacgcagatgacgacggcgcgttttttgtaacgccccgttaggcatatttgcccttggtgttcccaaaggttaattatgcccaaaagaacacccccgccttacgacgggggtgttctcatttttcgagcttccgcatcacgctgttgtacacgcgctcgttgacgattttaaggctgtccatcagctcgtccatgacctcccacgctcttgccggggccatgtcggagacggcctgcaaaaa

SEQ ID NO: 35354 - DNA, 260 bp, Unknown
  Description of Unknown: RightRegion for integrase B9355 sequence
cgctttatccggagaattgatgcagatgacgacggcgcgttttttgtaacgccacgttaggcatatttgaccttcgtgttcccaaaggtaaattatgcccaaaagaatcccccgccttacgacgggggtgttctcatttttcgagcttacgcatgacgctattatagacgcgctcgttcacaattttcaaactgtccatcagctcgtccatgatctcccacgccttgtccggcggaatatctgccactgcgcgcaggaag

SEQ ID NO: 35355 - DNA, 260 bp, Unknown
  Description of Unknown: RightRegion for integrase B9356 sequence
tggacaccggagatgcgggaagccgcacgaaagaaaacacagaggcgaggtgagcattgatgcaggcagcaaaaaatataacggtcatcccagcgacacggatgatgcacacgggacttcctcgcaatgctgccgtccgaaagcgtgtggcgggttatgcccgtgtctctaccgacagcgaagaacagcagacgagctatgaagcacaggtggattattacaccaattatatccagtcgaagcctgattgggagttcgtc

SEQ ID NO: 35356 - DNA, 260 bp, Unknown
  Description of Unknown: RightRegion for integrase B9357 sequence
cgcttcatcaggcggattgatgcagacaacgatggcgcgtttttcgtaacgccccgttaggcatattttaccttcacggacataaagggcaaatatgcctaaaaaatcccccgccgtaaatgacgggggatttttcacttttccagcttgcgcataacgctgttatacactcgctcgttgacgaccttcaagctgtccatgagttcgtccatcacttcccacgcacgggccgggtcaacgcgggccaccgcgcggaggaa

SEQ ID NO: 35357 - DNA, 71 bp, Unknown
  Description of Unknown: RightRegion for integrase B9358 sequence
ttttttaatctcctgtcaagatactgtctcttatacacatctccgagcccacgagactaggcatgatctcg

SEQ ID NO: 35358 - DNA, 260 bp, Unknown
  Description of Unknown: RightRegion for integrase B9359 sequence
cgcacgatccagcgcatcgacgcagacaatgacggtgcgttttttgtaacgcccagttagtcttattttcatgtcacaacgcctacgtcaaaatataactaaccccccggcatttgccgagggggttaagtttagctttccaattttcgcatgacgctattataaacccgctcgttgaccactttcaagctgtccatcagctcgtccatgacctcccacgcacgggctgggtcaacgttagacaccgcccggaggaattc

SEQ ID NO: 35359 - DNA, 260 bp, Unknown
  Description of Unknown: RightRegion for integrase B9360 sequence
attcgccggattgtagtttcagaaaacggcgacatcttttttgaactcgtttggctataaagaaccttaacaccagttaacgtataatatagctaaacaggggatgcattatgcatcccctaaaatatagtttactgctttttcagctttgccagcggcagagattatcatagttggatcattttttagaacttgcatccaaccttgaagatatgcagcgctatttcggaaagaagctcttgtttctatccctacatggg

SEQ ID NO: 35360 - DNA, 260 bp, Unknown
  Description of Unknown: RightRegion for integrase B9361 sequence
cgcacgattcagcgcatcgacgcagacaatgacggtgcgttttttgtaacgcccagttagtcttattttcacgtcacaacgcctacgtcaaaatataactaaccccccggcatttgccgaggggttaagtttagctttccaatttccgcatgacgctattataaacccgctcgttgatcactttcaagctgtccatcagctcgtccatgacctcccacgcacgggctgggtcaacgttagataccgctcggaggaaatcg

SEQ ID NO: 35361 - DNA, 260 bp, Unknown
  Description of Unknown: RightRegion for integrase B9362 sequence
cgctttattcggagaattgacgcagatgacgacggcgcgttttttgtaacgccccgttaggcatatttgaccttcgtgttcacgaaggtcaaatatgcctaaaaaaaacacccccgtcgtaaggcgggggtgtcctcatttttcgagcttccgcatcacgctgttgtacacgcgctcgttgacgattttaaggctgtccatcagctcgtccatgacctcccacgctcttgctggagccatgttagagacggcccgcaaaa

SEQ ID NO: 35362 - DNA, 260 bp, Unknown
  Description of Unknown: RightRegion for integrase B9363 sequence
cgcacgatccagcgcatcgacgcagacaatgacggtgcgttttttgtaacgccaagttagtcttattttcatgtcacaacgctaacattaaaatataactaacccctcggcatttgccgaggggttaaatttagctttccaatttccgcatgacgctattgtaaacccgctcgttgaccactttcaagctgtccatcagctcgtccatgacctcccacgcacgggctgggtcaacgttagataccgcccggaggaattcg

SEQ ID NO: 35363 - DNA, 260 bp, Unknown
  Description of Unknown: RightRegion for integrase B9364 sequence
cgcttcatcaggcggattgatgcagacaacgatggcgcgttttttgtaacaccgcgttaggcatattttaccttcatggaattcaccgtatacccgaagtatttttgcagcgtctcgatgtccccccggtcccaggccacctcgattgcgtggcggatggcccgctccacccgggacggcgtggtgcagaagcgcttggctacctcgggatacagtacctttgtcacggcgttgatcacatccatgtcattcaccgcgat

SEQ ID NO: 35364 - DNA, 260 bp, Unknown
  Description of Unknown: RightRegion for integrase B9365 sequence
cgcttcatcaggaggattgatgcagacaacgatggcgcgtttttcgtaacgccgcgttaggtatattttactttcacgttggataccgtgtagccaaaatagcgctggagcgtctcaaggtcgccgcggtcccacgcgacctcgatcgcatggcgcaccgcgcgctcgacgcgcgagggcgtggtgctgtagcggcgcgcgacttcgggataaagcactttcgtcacggcgttgatgacatccatgtcctgcacggcgat

SEQ ID NO: 35365 - DNA, 260 bp, Unknown
  Description of Unknown: RightRegion for integrase B9366 sequence
cgctttatccggagaattgacgcagatgacgacggcgcgttttttgtaacgccacgttaggcatatttgacctttgtgttcccaaaggtaaattttgcccaaaagaatcccccgccttacgacgggggtgttcttatttttcgagcttccgcatcacgctgttgtacacgcgctcgtttacgattttcaagctgtccatcagctcgtccatgatctcccacgccttgtccggtgaaacatctgccactgcgcgcaaaaaa

SEQ ID NO: 35366 - DNA, 260 bp, Unknown
  Description of Unknown: RightRegion for integrase B9367 sequence
cgctttatccggagaattgacgcagatgacgacggcgcgttttttgtaacgccccgttaggcatatttgcccttggtgttcccaaaggttaattatgcccaaaagaacacccccgccttacgacgggggtattctcatttttcgagcttccgcattacgctgttgtacacgcgctcgttgacgattttaaggctgtccatcagctcgtccatgacctcccacgctcttgccggggccatgtcggagacggcctgcaaaaa

SEQ ID NO: 35367 - DNA, 260 bp, Unknown
  Description of Unknown: RightRegion for integrase B9368 sequence
cgcacgatccagcgcatcgacgcagacaatgacggtgcgttttttgtaacgcccagttagtcttattttcatgtcacaacgcctacattaaaatataactaaccccccggcatttgccgaggggtttaagtttagctttccaatttccgcatgacgctattgtaaacccgcgcatttaccactttcaagctgtccatcagctcgtccatgacctcccacgcacgggctgagtcaacgttagccaccgcccggaggaattc

SEQ ID NO: 35368 - DNA, 260 bp, Unknown
  Description of Unknown: RightRegion for integrase B9369 sequence
cgctttatccggagaattgacgcagatgacgacggcgcgttttttgtaacgccacgttaggcatatttgcccttggtgttcccaaaggtaaattttgcccaaaagaatcccccgccttacgacgggggtgttcttatttttcgagcttccgcatcacgctgttgtacacgcgctcgtttacgattttcaagctgtccatcagctcgtccatgatctcccacgctcttgccggagccatgtcggagacggcctgcaaaaaa

SEQ ID NO: 35369 - DNA, 260 bp, Unknown
  Description of Unknown: RightRegion for integrase B9370 sequence
cgcttcatcaggcggattgatgcagacaacgatggcgcgtttttcgtaacgccccgttaggcatattttaccttcacggacataaaggacaaatatgcctaaaaaatcccccgccgtaaatgacgggggatttttcacttttccagcttgcgcataacgctgttatacactcgctcgttgacgaccttcaagctgtccatcagctcgtccatgatctcccatgccttgtccggtgaaacatctgccactgcgcgcaggaa

SEQ ID NO: 35370 - DNA, 81 bp, Unknown
  Description of Unknown: RightRegion for integrase B9371 sequence
cgctttatccggagaattgacgcagatgacgacggcgcgttttttgtaacgccccgttaggcatatttgaccttggtgttc

SEQ ID NO: 35371 - DNA, 260 bp, Unknown
  Description of Unknown: RightRegion for integrase B9372 sequence
cgctttattcggagaattgacgcagatgacgacggcgcgttttttgtaacgccccgttaggcatatttgaccttcgtgttcccaaaggtaaattatgcctaaaagaatccccccgccttacgacgggggtattctcatttttcgagcttccgcatcacgctgttgtacacgcgctcgttgacgattttaaggctgtccatcagctcgtccatgacctcccacgctcttgctggagccatgtcggagacggcctgcaaaaa

SEQ ID NO: 35372 - DNA, 260 bp, Unknown
  Description of Unknown: RightRegion for integrase B9373 sequence
cgcacgatccagcgcatcgacgcagacaatgacggtgcgttttttgtaacgcctagttagtcttattttcatgtcacaacgcctacgttaaaatataactaaccccccggcatttgccgagggggttaagtttagttttccaatttccgcatgacgctattataaacccgctcgttgaccactttcaagctgtccattagctcgtccatgacctcccacgcacgggctgggtcaacgttagacaccgcccggaggaaatc

SEQ ID NO: 35373 - DNA, 260 bp, Unknown; identical to SEQ ID NO: 35356
  Description of Unknown: RightRegion for integrase B9374 sequence

SEQ ID NO: 35374 - DNA, 260 bp, Unknown; identical to SEQ ID NO: 34890
  Description of Unknown: RightRegion for integrase B9375 sequence

SEQ ID NO: 35375 - DNA, 260 bp, Unknown
  Description of Unknown: RightRegion for integrase B9376 sequence
cgctttatctggagaattgacgcagatgacgacggcgcgttttttgtaacgccacgttaggcatatttgaccttggcgttcccaaaggtaaattatgcccaaaagaatccccccgccttacgacgggggtgttctcatttttccagcttccgcatcacgctgttgtacacgcgctcgttgacgattttcaggctgtccatcagctcgtccatgacctcccacgctcttgccggagccatgtccgagacggcctgcaaaaa

SEQ ID NO: 35376 - DNA, 260 bp, Unknown; identical to SEQ ID NO: 35359
  Description of Unknown: RightRegion for integrase B9377 sequence

SEQ ID NO: 35377 - DNA, 260 bp, Unknown
  Description of Unknown: RightRegion for integrase B9378 sequence
cgctttatccgaagaattgatgcagatgacgacggcgcgttttttgtaacgccgcgttaggcataatttacctttgtcgacacgaaggtaaattatacccaaaagaacacccccgccttacgacgggggtattctcatttttcgagtttccgcatgacgctgttatagacgcgctcgttcactattttcaagctgtccatcagctcgtccatgatctcccatgccttgtccggtgaaacatctgccactgcgcgcaggaa

SEQ ID NO: 35378 - DNA, 73 bp, Unknown
  Description of Unknown: RightRegion for integrase B9379 sequence
attcgccggattgtagtttcagaaaacggcgacatcttttttgaacttgtttggctataaagaaccttaacac

SEQ ID NO: 35379 - DNA, 260 bp, Unknown
  Description of Unknown: RightRegion for integrase B9380 sequence
cgcgtcatcaagcggattgatgcagacaacgatggcgcgttttttgtaatgccacgttaggcatattttaccctcgcggacacaaaggataagtatacctaaaaatcccccgccgtaaatgacgggggattttttacctatcgagtttacgcatgacgctgttgtagacgcgctcgttaacaactttcaaactgtccatcagttcgtccataaccgcccatgccacacttggctcaacagctgatacggcccgcagaaag

SEQ ID NO: 35380 - DNA, 260 bp, Unknown
  Description of Unknown: RightRegion for integrase B9381 sequence
cgctttatccggagaattgacgcagatgacgacggcgcgttttttgtaacgccccgttaggcatatttgcccttgctgttcccaaaggtaaattatgcctaaaatgacacccccgccgtaaggcgggggtgttctcatttttcgagcttccgcatcacgctgttgtacacgcgctcgttgacgattttaaggctgtccatcagctcgtccatgacctcccacgctcttgccggagccatgtcggagacggcctgcaaaaa

SEQ ID NO: 35381 - DNA, 260 bp, Unknown
  Description of Unknown: RightRegion for integrase B9382 sequence
aaaattatctttgattttgatgaacaaattgtactcagtattcagtttaaaaagaagtgattcttattggttatagaatacttgaatctcaaatcattgccctatggggatcgtatttgaaagttcaaaaataataaaatgctcaaattatgtttgaaatataacatatcacactgctatactaggcattgttggatgagccataaatcataacacttgtaaatcaatatcatccaacacttttattccatgagctggcg

SEQ ID NO: 35382 - DNA, 260 bp, Unknown
  Description of Unknown: RightRegion for integrase B9383 sequence
cgctttattcggagaattgacgcagatgacgacggcgcgttttttgtaacgccccgttaggcatatttgaccttcgtgttcacaaaggtaaattatgcccaaaagaacacccccgccttacgacgggggtgccctcatttttcgagctttcgcatcacgctattgtacacgcgctcattgacgattttaaggctgtccatcagctcgtccatgacctcccacgctcttgccggagccatgtcggagacggcctgcaaaaa

SEQ ID NO: 35383 - DNA, 260 bp, Unknown
  Description of Unknown: RightRegion for integrase B9384 sequence
cgctttatccggcaaattgacgcagatgacgacggcgcgttttttgtaacgccacgttaggcatatttgacctttgtgttcccaaaggtaaattatgcccaaaaggacacccccgccttacgacgggggtgtcctcatttttcgagtttccgcatgacgctgttgtacacgcgctcgttgacgattttaaggctgtccatcagctcgtccataatctcccacgccttgacgctgtccatgccgctgacggcaagcaaaaa

SEQ ID NO: 35384 - DNA, 260 bp, Unknown; identical to SEQ ID NO: 35359
  Description of Unknown: RightRegion for integrase B9385 sequence

SEQ ID NO: 35385 - DNA, 260 bp, Unknown
  Description of Unknown: RightRegion for integrase B9386 sequence
cgctttatccggagaattgacgcagatgacgacggcgcgttttttgtaacgccacgttaggcatatttgacctttgtgttcccaaaggtaaattatgcccaaaagaatcccccgccttacgacgggggtgttcttatttttcgagcttccgcatcacgctgttgtacacgcgctcgttgacgattttaaggctgtccatcagctcgtccatgacctcccacgctcttgccggagccatgtcggagacggcctgcaaaaaa

SEQ ID NO: 35386 - DNA, 260 bp, Unknown; identical to SEQ ID NO: 35348
  Description of Unknown: RightRegion for integrase B9387 sequence

SEQ ID NO: 35387 - DNA, 260 bp, Unknown
  Description of Unknown: RightRegion for integrase B9388 sequence
cgctttatccggaggattgatgcagatgacgacggcgcgttttttgtaacgccccgttaggcatatttgaccttcgtgttcctaaaggtaaactatgcccaaaaagacacccccgccttacgacgggggtgttctcatttttcgatcttccgcatgacgctattatagacgcgctcgtttacgattttcaagctgtccatcagctcgtccataatctcccacgccttgtccggcggaacatccgccactgcgcgcagaaa

SEQ ID NO: 35388 - DNA, 75 bp, Unknown
  Description of Unknown: RightRegion for integrase B9389 sequence
attcgccggattgtagtttcagaaaacggcgacatcttttttgaacttgtttggctataaagaaccttaacaccg

SEQ ID NO: 35389 - DNA, 260 bp, Unknown
  Description of Unknown: RightRegion for integrase B9390 sequence
cgcttcatcagaaggattgatgcagacaacgatggcgcgttttttgtaacgccgcgttaggcatattttactttcacgttcgcaaaggtaaagtatgcctaaaagataccccccgcctttgtgacgggggtatcctcatttttcaagcttctgcatgacgctgttgtatacgcgctcgttgaccactttgagactgtccattagctcatccatgaccgcccacgccttaacgctgtccatgccgctgacggcgagcaaaa

SEQ ID NO: 35390 - DNA, 260 bp, Unknown
  Description of Unknown: RightRegion for integrase B9391 sequence
cgcttcatcaggcggattgatgcagacaacgatggcgcgtttttcgtaacaccccgttaggcatattttaccttcacggacataaagggcaaatatgcctaaaaaatcccccgccgtaaatgacgggggatttttcacttttccagcttgcgcataacgctgttatacactcgctcgttgacgaccttcaagctgtccatgagttcgtccatcacttcccacgcacgggccgggtcaacgcgggccaccgcgcggaggaa

SEQ ID NO: 35391 - DNA, 260 bp, Unknown
  Description of Unknown: RightRegion for integrase B9392 sequence
cgcttcatcaggcggattgatgcagacaacgatggcgcgttttttgtaacaccgcgttaggcatattttaccttcatggacataaagggcaaatatgcctaaaaaatcccccgccgtaaatgacgggggatttttcacttttccagcttgcgcataacgctgttatacactcgctcgttgacgaccttcaagctgtccatgagttcgtccatcacttcccacgcacgggccgggtcaacgcgggccaccgcgcggaggaa

SEQ ID NO: 35392 - DNA, 260 bp, Unknown
  Description of Unknown: RightRegion for integrase B9393 sequence
ataattacaagggagcaggtagtggaatggctgaaagagatgaaaaggcttgacctttaattggacgacagtaaacgcaaacttgtagatacctttgtaaattcagtttatctgtacgatgacaaggttgtcatcatctttaattgtagggaaggggcgagtacactcgccctccctttggacgatacttcggcttgtatgcgaattggggagccaaaacaaaaacatacaaaccgtttcgataatatgcggctgtatgg

SEQ ID NO: 35393 - DNA, 260 bp, Unknown; identical to SEQ ID NO: 35369
  Description of Unknown: RightRegion for integrase B9394 sequence

SEQ ID NO: 35394 - DNA, 260 bp, Unknown
  Description of Unknown: RightRegion for integrase B9395 sequence
cgcacgatccagcgcatcgacgcagacaatgacggtgcgttttttgtaacgccaagttagtcttattttcatgtcgcaacactaactgtatatccgaaatatttttgcaaggtctccaaatcgccccggtcccaggctacctcgatggcgtggcggatggcccgctccacccgggaaggcgttgtggcgaaccgcttggccacttcaggatagagaaccttcgtcaccgcgttgatgacatccatatcccgcaccgtgat

SEQ ID NO: 35395 - DNA, 260 bp, Unknown
  Description of Unknown: RightRegion for integrase B9396 sequence
cgctttatccggagaattgacgcagatgacgacggcgcgttttttgtaacgccacgttaggcatatttgaccttcgtgttcccaacggtaaattatgcccaaaagatacccccgccttacgacgggggtgttctcatttttcgagtttgcgcatgacgctattatagacgcgctcgtttacaattttcaagctctccatcagctcgtccatgatctcccatgccttgtccggcggaacatctgccactgcgcgcagaaaa

SEQ ID NO: 35396 - DNA, 260 bp, Unknown; identical to SEQ ID NO: 35193
  Description of Unknown: RightRegion for integrase B9397 sequence

SEQ ID NO: 35397 - DNA, 260 bp, Unknown
  Description of Unknown: RightRegion for integrase B9398 sequence
cgctttattcggagaattgacgcagatgacgacggcgcgttttttgtaacgccccgttaggcatatttgaccttcgtgttcccaaaggtaaattatgcccaaaagaatcccccgtcttacgacgggggactctcatttttcgagcttccgcatcacgctgttgtacacgcgctcattgacaattttaaggctgtccatcagctcatccatgacctcccacgctcttgccggatccatgttagagacggcctgcaaaaaat

SEQ ID NO: 35398 - DNA, 260 bp, Unknown
  Description of Unknown: RightRegion for integrase B9399 sequence
cgcttcatcagaaggattgatgcagacaacgatggcgcgtttttcgtaacgccgcgttaggcatattttactttcacgttccaagaggtaaattatgcccaaaagaatcccccgccttacgacgggggtattctcatttttcgagtttgcgcatgacgctattatagacgcgctcgtttacaattttcaagctgtccatcagctcgtccatgattccccacgccttgtctggcggaacgtctgccaccgcgcgcaaaaat

SEQ ID NO: 35399 - DNA, 260 bp, Unknown
  Description of Unknown: RightRegion for integrase B9400 sequence
cgcacgatccagcgcatcgacgcagacaatgacggtgcgttttttgtaacgccaagttagtcttattttcacgtcacaacgcctacattaaaatataactaaccccccggcatttgccgagggggttaagtttagctttccaatttccgcatgacgctattgtaaacccgcgcatttactactttcaagctgtccatcagctcgtccatgacctcccacgcacgggctgggtcaacgttggacaccgcccggaggaattc

SEQ ID NO: 35400 - DNA, 260 bp, Unknown
  Description of Unknown: RightRegion for integrase B9401 sequence
cgctttatccggagaattgacgcaaatgacgacggcgcgttttttgtaacgccccgttaggcatatttgaccttggtgttccaaaaggtaaattatgcccaaaagaatacccccgccttacgacgggggtgttctcattttccgagtttccgcatcacgctgttgtacacgcgctcgttgacgattttaaggctgtccatcagctcgtccatgacctcccacgctcttgccggagacatgccggagacggcctgcaaaaa

SEQ ID NO: 35401 - DNA, 109 bp, Unknown
  Description of Unknown: RightRegion for integrase B9402 sequence
cgctttatccggagaattgacgcagatgacgacggcgcgttttttgtaacgccacgttaggcatatttgcccttggtatttgacaccgtgtagccgaagtagcgctgga

SEQ ID NO: 35402 - DNA, 260 bp, Unknown
  Description of Unknown: RightRegion for integrase B9403 sequence
cgctttatccggagaattgacgcagatgacgacggcgcgttttttgtaacgccccgttaggcatatttgaccttggtgttcacaaaggtaaattatgcccaaaagaatccccccgccttacgacgggggtgttcttatttttcgagcttccgcatcacgctgttgtacacgcgctcgttgacgattttaaggctgtccatcagctcgtccatgacctcccacgctcttgccggagccatgtcagagacggcctgcaaaaa

SEQ ID NO: 35403 - DNA, 260 bp, Unknown; identical to SEQ ID NO: 35348
  Description of Unknown: RightRegion for integrase B9404 sequence

SEQ ID NO: 35404 - DNA, 260 bp, Unknown
  Description of Unknown: RightRegion for integrase B9405 sequence
cgctttatccggagaattgacgcagatgacgacggcgcgttttttgtaacgacccgttaggcatatttgaccttggtgttccaaaaggtaaattatgcccaaaaggacacccccgccttacgacggggggtgttcttatttttcgagctttcgcatcacgctgttgtacacgcgctcattgacgattttaaggctgtccatcagctcgtccatgacctcccacgctcttgccggagccatgtcagagacggcctgcaaaa

SEQ ID NO: 35405 - DNA, 260 bp, Unknown
  Description of Unknown: RightRegion for integrase B9406 sequence
gagcaagctataaaaaagtcattagttaattatttgaggggcggtaatattaatggctaaagttacaattatcccctcaaagaaaaatccaataaccttaactccaatcaatgaaattattaaaaagaaggttgctgcttatgctcgtgtttcaactgatagtgatgagcaatttacttcatttgattcacaatgtaaggtctatgaagattacattaaaagtaaacctgattgggaatttgtaaaagtctatgctgatg

SEQ ID NO: 35406 - DNA, 260 bp, Unknown
  Description of Unknown: RightRegion for integrase B9407 sequence
cgctttatccggagaattgacgcagatgacgacggcgcgttttttgtaacgccacgttaggcatatttgaccatcgtgttcccaaaggtaaattatgcccaaaagaatcccccgccttacgacgggggtgttcttatttttcgagcttccgcatgacgctgttgtatacgcgctcgttcacaattttcaaactgtccatcagctcgtccatgatttcccacgccttgtccggtggaacatctgccactgcgcgtagaaaa

SEQ ID NO: 35407 - DNA, 260 bp, Unknown
  Description of Unknown: RightRegion for integrase B9408 sequence
cgcttcatcaagcggattgatgcagacaacgatggcgcgtttttcgtaacgccacgttaggcatatttccccttggcggacacaaagggtaagtatgcctaaaaatcccccgccgtaaatgacgggggattttttacctatcgagtttacgcatgacgctgttgtagacgcgctcgttaacaactttcaaactgtccatcagttcgtccataaccgcccatgccacacttggctcaacagctgatacggcccgcagaaag

SEQ ID NO: 35408 - DNA, 260 bp, Unknown
  Description of Unknown: RightRegion for integrase B9409 sequence
cgctttattcggagaattgacgcagatgacgacggcgcgttttttgtaacgccccgttaggcatatctgaccttcgtgttcccaaaggtaaattatgcccaaaagaacacccccgccttacgacgggggtgttctcatttttcgagcttccgcatcacgctgttgtacacgcgctcgttgacgattttaaggctgtccatcagctcgtccatgacctcccacgctcttgccggagccatgttagagacggcctgcaaaaa

SEQ ID NO: 35409 - DNA, 260 bp, Unknown
  Description of Unknown: RightRegion for integrase B9410 sequence
cgcacgatccagcgcatcgacgcagacaatgacggtgcgttttttgtaacgcccagttagtcttattttcatgtcacaacgcctacgttaaaatataactaaccccccggcatttgccgaggggttaagtttagctttccaatttccgcatgacgctattgtaaacccgctcgttgaccactttcaagctgtccatcagctcgtccatgacctcccacgcacgggctgggtcaacgttagacaccgcccggaggaaatcg

SEQ ID NO: 35410 - DNA, 260 bp, Unknown; identical to SEQ ID NO: 35367
  Description of Unknown: RightRegion for integrase B9411 sequence

SEQ ID NO: 35411 - DNA, 260 bp, Unknown
  Description of Unknown: RightRegion for integrase B9412 sequence
cgcttcatccggagaattgacgcagatgccgacggcgcgttttttgtaacgccccgttaggcatatttgaccttcgttttcccaaaggtaaattatgcccaaaagaatcccccgccttacgacgggggtgttctcatttttcgagcttacgcatgacgctattatagacgcgctcgttcacaattttcaaactgtccatcagctcgtccatgatctcccacgccttgtccggcggaatatctgccactgcgcgcaggaag

SEQ ID NO: 35412 - DNA, 260 bp, Unknown
  Description of Unknown: RightRegion for integrase B9413 sequence
cgctttatccggagaattgacgcagatgacgacggcgcgttttttgtaacgccccgttaggcatatttgaccttggtgttaccaaaggtaaattatgcccaaaagaatcccccgccttacgacgggggtgttcttatttttcgagcttccgcatcacgctgttgtacacgcgctcgttgacgattttaaggctgtccatcagctcgtccatgacctcccacgctcttgctggagccatgccggagacggcctgcaaaaaa

SEQ ID NO: 35413 - DNA, 260 bp, Unknown; identical to SEQ ID NO: 35369
  Description of Unknown: RightRegion for integrase B9414 sequence

SEQ ID NO: 35414 - DNA, 260 bp, Unknown
  Description of Unknown: RightRegion for integrase B9415 sequence
cgctttatccggagaattgacgcagatgacgacggcgcgttttttgtaacgccacgttaggcatatttgaccttggtgttcctaaaggtaaattatgcccaaaagatacccccgccttacgacgggggtgttctcatttttcgagcttccgcatcacgctgttgtatacgcgctcgttgacgattttaaggctgtccatcagctcgtccatgacctcccacgccttgacgctgtccatgccgctgacggcaagcaaaaat

SEQ ID NO: 35415 - DNA, 260 bp, Unknown; identical to SEQ ID NO: 35414
  Description of Unknown: RightRegion for integrase B9416 sequence

SEQ ID NO: 35416 - DNA, 185 bp, Unknown
  Description of Unknown: RightRegion for integrase B9417 sequence
gagcaagctataaaaaagtcattagttaattatttgaagggtggtaatattaatggctaaagttacaattatcccttcgaagaaaaatccaataaccttaactccaatcaatgaaattattaaaaagaaagttgctgcttatgctcgtgtttcaactgatagtgatgagcaatttacttcatttg

SEQ ID NO: 35417 - DNA, 260 bp, Unknown
  Description of Unknown: RightRegion for integrase B9418 sequence
cgctttatcaggcggattgatgcagacaacgatggcgcgtttttcgtaacgccgcgttaggcatactttaccttcacgtccgccaagggcaagcccaccaacagtgaattcatcgccatgatcgccgaccggcttcagcttcggatgaagcgcggccacgcgtaacaccgcacacgacctttgcccggcaggacaagagggggagaaaccacggggacgcgccgtccccgtggttttctatcctttaggcggcatctcgt

SEQ ID NO: 35418 - DNA, 260 bp, Unknown
  Description of Unknown: RightRegion for integrase B9419 sequence
cgctttatccggagaattgacgcagatgacgacggcgcgttttttgtaacgccacgttaggcatatttgcccttggcgttcccaaaggtaaattttgcccaaaagaatcccccgccttacgacgggggtgttcttatttttcgagcttccgcatcacgctgttgtacacgcgctcgtttacgattttcaagctgtccatcagctcgtccatgatctcccacgccttgtccggtgaaacatctgccactgcgcgcaaaaaa

SEQ ID NO: 35419 - DNA, 260 bp, Unknown; identical to SEQ ID NO: 35391
  Description of Unknown: RightRegion for integrase B9420 sequence

SEQ ID NO: 35420 - DNA, 260 bp, Unknown
  Description of Unknown: RightRegion for integrase B9421 sequence
cgcttcatcaggaggattgatgcagacaacgatggcgcgtttttcgtaacgccgcgttaggcatattttactttcacgttcgcaaaggtaaagtatgcctaaaagatacccccgcctttgtgacgggggtatcctcatttttcaagtttctgcatgacgctgttgtatacgcgctcgtttacaattttcaaactgtccatcagctcgtccatgatcttccacgccttgtccggcggaacatctgccactgcgcgcagaaa

SEQ ID NO: 35421 - DNA, 260 bp, Unknown
  Description of Unknown: RightRegion for integrase B9422 sequence
cgcttcatcaggcggattgatgcagacaacgatggcgcgtttttcgtaacgccccgttaggcatattttaccttcatggacgcaaagggtaagtatgcctaaaaaatcccccgccgtaaatgacgggggatttccctattccagcttgcgcatgacgctgttatacactcgctcgttgacgaccttcaagctgtccatgagttcgtccatcacttcccacgcacgggccgggtcaacgcgggccaccgcgcggaggaaat

SEQ ID NO: 35422 - DNA, 260 bp, Unknown
  Description of Unknown: RightRegion for integrase B9423 sequence
cgcttcatcagaaggattgatgcagacaacgatggcgcgtttttcgtaacgccacgttaggcatatttgaccttcgtgttccacaaggtaaattatgcccaaaagaatacccccgccttacgacgggggtattctcatttttcgagcttgcgcatgacactattatagacgcgctcgtttacgattttcaagctgtccatcagctcgtccatgatgccccacgccttttcttgtgagactttcgacacggcgcgtagaaa

SEQ ID NO: 35423 - DNA, 260 bp, Unknown
  Description of Unknown: RightRegion for integrase B9424 sequence
cgctttatccggagaattgatgcagataacgacggcgcgttttttgtaacgccccgttaggcatatttgaccttcgtgttcttaaaggtaaattatgcccaaaagaatcccccgccttacgacgggggtattctcatttttcgagcttgcgcatgacgctattatagacgcgctcgttcacaattttcaaactgtccatcagctcgtccataatcacccacgccttgcccggcggaacatctgccactgcgcgcagaaaa

SEQ ID NO: 35424 - DNA, 260 bp, Unknown
  Description of Unknown: RightRegion for integrase B9425 sequence
cgctttatccggagaattgacgcagatgacgacggcgcgttttttgtaacgccccgttaggcatatttgactttcgtgttcccaaaggtaaattatgcccaaaagaacacccccgccttacgacgggggtgttctcatttttcgagtttccgcatcacgctgttatacacgcgctcgttgacgattttaaggctgtccatcagctcgtccatgacctcccacgctcttgccggagccatgtcggagacggcctgcaaaaa

SEQ ID NO: 35425 - DNA, 260 bp, Unknown
  Description of Unknown: RightRegion for integrase B9426 sequence
cgcttcatcaggcggattgatgcagacaacgatggcgcgtttttcgtaacgccccgttaggcatattttaccttcacggacataaagggcaagtatgcctaaaaaatcccccgccgtaaatgacgggggatttccctattccagcttgcgcataacgctgttatacactcgctcgttgacgaccttcaagctgtccatgagttcgtccatcacttcccacgcacgggccgggtcaacgcgggccaccgcgcggaggaaat

SEQ ID NO: 35426 - DNA, 260 bp, Unknown
  Description of Unknown: RightRegion for integrase B9427 sequence
attcgccggattgtagtttcagaaaacggcgacatcttttttgaacttgtttggctataaagaaccttaacccctgttagcgtataatatagctaaacaggggatgcatagtgcatcccctaaaatatagtttactgctttttcagcttttccagcggcagagataatcatagttggatcattttttagaactcgcatccaactttgaagatatgcagcgctatttcggaaagaagcttttgtttctatccctacatggg

SEQ ID NO: 35427 - DNA, 260 bp, Unknown; identical to SEQ ID NO: 35356
  Description of Unknown: RightRegion for integrase B9428 sequence

SEQ ID NO: 35428 - DNA, 260 bp, Unknown
  Description of Unknown: RightRegion for integrase B9429 sequence
attcgccggattgtaatttcagaaaacggcgacatcttttttgaacttgtttggctataaggaaccttaacacctgttagcgtataatatagctaaacaggggatgcattatgcatcccctaaaatatagtttactgctttttcagctttgccagcggcagagactatcatagttggatcattttttagaacttgcatccaaccttgaagatatgcagcgctatttcggaaagaagctcttgtttctatccctacatggg

SEQ ID NO: 35429 - DNA, 260 bp, Unknown
  Description of Unknown: RightRegion for integrase B9430 sequence
cgctttatccggagaattgacgcagatgacgacggcgcgttttttgtaacgccccgttaggcatatttgaccttcgcgttcacaaaggtaaattatgcctaaaagaatcccccgccttacgacgggggtgttctcatttttcgagcttccgcatcacactgttgtacactcgctcgttcacgattttcaagctgtccatcagctcgtccatgatctcccatgccttgacgctgtccatgccgctgacggcaagcaaaaat

SEQ ID NO: 35430 - DNA, 260 bp, Unknown; identical to SEQ ID NO: 34973
  Description of Unknown: RightRegion for integrase B9431 sequence

SEQ ID NO: 35431 - DNA, 260 bp, Unknown
  Description of Unknown: RightRegion for integrase B9432 sequence
cgctttatccggagaattgacgcagatgacgacggcgcgttttttgtaacgccacgttaggcatatttgcccttggtgttcccaaaggtaaattttgcccaaaagaatcccccgccttacgacgggggtgttcttatttttcgagcttccgcatcacgctgttgtacacgcgctcgtttacgattttcaagctgtccatcagctcgtccatgatctcccacgccttgtccggtgaaacatctgccactgcgcgcaaaaaa

SEQ ID NO: 35432 - DNA, 260 bp, Unknown
  Description of Unknown: RightRegion for integrase B9433 sequence
cgctttatccggagaattgacgcagatgacgacggcgcgttttttgtaacgccccgttaggcatatttgcccttggtgttccaaaaggtaaattatgcccaaaaggacacccccgccttacgacgggggtgttctcatttttcgagcttccgcatgacgctgttgtacacgcgctcgttgacgattttaaggctgtccatcagctcgtccatgacctcccacgctcttgccggagccatgtcggagacggcctgcaaaaa

SEQ ID NO: 35433 - DNA, 260 bp, Unknown; identical to SEQ ID NO: 35366
  Description of Unknown: RightRegion for integrase B9434 sequence

SEQ ID NO: 35434 - DNA, 260 bp, Unknown
  Description of Unknown: RightRegion for integrase B9435 sequence
cgctttatccggagaattgacgcagatgacgagggcgcgttttttgtaacgccccgttaggcatatttgcccttggtgttccaaaaggtaaattatgcccaaaagaatccccccgtcttacgacggggggtgttctcatttttcgagcttccgcatcacgctgttgtacacgcgttcattgacgattttaaggctgtccatcagctcatccatgacctcccacgctcttgccggagacatggcggagacggcctgcaaaa

SEQ ID NO: 35435 - DNA, 109 bp, Unknown
  Description of Unknown: RightRegion for integrase B9436 sequence
cgcacaatccagcgcatcgacgcagacaatgacggtgcgttttttgtaacgccaagttagtcttattttcatgtcgcaacactaactgtatatccgaaatatttttgca

SEQ ID NO: 35436 - DNA, 260 bp, Unknown
  Description of Unknown: RightRegion for integrase B9437 sequence
cgctttattcggagaattgacgcagatgacgacggcgcgttttttgtaacgccacgttaggcatatttgaccttggtgttaccaaaggtaaattatgcccaaaagaatcccccgccttacgacgggggtgttcttatttttcgagcttccgcatcacgctgttgtacacgcgctcgttgacgattttaaggctgtccatcagctcgtccatgacctcccacgctcttgctggagccatgccggagacggcctgcaaaaaa

SEQ ID NO: 35437 - DNA, 260 bp, Unknown
  Description of Unknown: RightRegion for integrase B9438 sequence
cgcttcatcaggcggattgatgcagacaacgatggagcgtttttcgtaacgccccgttaggcatattttaccttcacggacataaagggcaagtatgcctaaaaaatcccccgccgtaaatgacgggggatttccctattccagcttgcgcatgacgctgttatacactcgctcgttgacgaccttcaagctgtccatgagttcgtccatcacttcccacgcacgggccgggtcaacgcgggccaccgcgcggaggaaat

SEQ ID NO: 35438 - DNA, 260 bp, Unknown
  Description of Unknown: RightRegion for integrase B9439 sequence
cgcacgatccagcgcatcgacgcagacaatgacggtgcgttttttgtaacgcccagttagtcttattttcatgtcacaacacctacgttaaaatataactaaccccccggcatttgccgagggggttaagtttagctttccaatttccgcatgacgctattataaacccgctcgttgaccactttcaagctgtccatcagctcgtccatgacctcccacgcacgggctgggtcaacgttagacaccgcccggaggaaatc

SEQ ID NO: 35439 - DNA, 260 bp, Unknown
  Description of Unknown: RightRegion for integrase B9440 sequence
cgctttatccgaagaattgacgcagatgacgacggcgcgttttttgtaacgccccgttaggcatatttgcccttggtgttcccaaaggtaaattatgcccaaaagacacccccgccttacgacgggggtgttctcatttttcgagcttccgcatcacgctattatagacgcgctcgttgacgattttaaggctgtccatcagctcgtccatgacctcccacgctcttgccggagccatgtcggagacggcctgcaaaaaa

SEQ ID NO: 35440 - DNA, 260 bp, Unknown
  Description of Unknown: RightRegion for integrase B9441 sequence
cgctttatccggagaattgacgcagatgacgacggcgcgttttttgtaacgcctcgttaggcatatttgaccttcgtgttcccaaaggtaaattatgcccaaaagaacacccccgccttacgacgggggtgttctcatttttccagcttccgcatcacgctgttgtacacgcgctcgttgacgattttcaggctgtccatcagctcgtccatgacctcccacgctcttgccggagccatgtccgagacggcctgcaaaaa

SEQ ID NO: 35441 - DNA, 260 bp, Unknown
  Description of Unknown: RightRegion for integrase B9442 sequence
cgcacgatccagcgcatcgacgcagacaatgacggtgcgttttttgtaacgcccagttagttttattttcatgtcacaacgcctacgttaaaatataactaaccccccggcatttgccgagggggttaagtttagctttccaatttccgcatgacgctattgtaaacccgcgcatttaccactttcaagctgtccatcaactcgtccatgacctcccacgcacgggctgggtcaacgttagacaccgcccggaggaattc

SEQ ID NO: 35442 - DNA, 260 bp, Unknown; identical to SEQ ID NO: 35431
  Description of Unknown: RightRegion for integrase B9443 sequence

SEQ ID NO: 35443 - DNA, 260 bp, Unknown
  Description of Unknown: RightRegion for integrase B9444 sequence
cgcttcatcaggaggattgatgcagacaacgatggcgcgttttttgtaacgccgcgttaggcatattttactttcacgttcgcaaaggtaaagtatgcctaaaagataccccccgcctttgtgacgggggtatcctcatttttcaagcttctgcatgacgctgttgtatacgcgctcgttgaccactttgagactgtccattagctcatccatgaccgcccacgccttaacgctgtccatgccgctgacggcgagcaaaa

SEQ ID NO: 35444 - DNA, 260 bp, Unknown
  Description of Unknown: RightRegion for integrase B9445 sequence
cgcttcatcaggcggattgatgcaaacaacgatggcgcgtttttcgtaacgccgcgttaggcatattttgccttcatgctatcgacagtaaaatacacctaaaaaatcccccgccgtttggcaggggatttttctattccagcttgcgcatgacgctgttatacactcgctcattgacaaccttcaagctgtccatcagctcgtccataacaatccatgcgcgggcatcatccacgcgggagaccgcgcggagaaaatcg

SEQ ID NO: 35445 - DNA, 260 bp, Unknown
  Description of Unknown: RightRegion for integrase B9446 sequence
cgcacgatccagcgcatcgacgcagacaatgacggtgcgttttttgtaacgccaagttagtcttattttcatgtcacaacgcctacgtcaaaatataactaaccccccggcatttgccgagggggttaagtttagctttccaatttccgcatgacgctattataaacccgctcgttgaccactttcaagctgtccatcagctcgtccatgacctcccacgcacgggctgggtcaacgttagacaccgcccggaggaaatc

SEQ ID NO: 35446 - DNA, 260 bp, Unknown
  Description of Unknown: RightRegion for integrase B9447 sequence
attcgccggattgtaatttcagaaaacggcgacatcttttttgagcttgtttggctataaagaaccttaacaccagttaacgtataatatggctaaataggggatgcactacgcatcccctaaaatatagtttactgctttttcagctttgccagcggcagagactatcatagttggatcattttttagaactcgcatccaactttgaagatatgcagcactatttcggaaagaagctcttgtttctatccctacatggg

SEQ ID NO: 35447 - DNA, 260 bp, Unknown
  Description of Unknown: RightRegion for integrase B9448 sequence
cgcttcatcaggcggattgatgcagacaacgatggcgcgtttttcgtaacgccccgttaggcatattttaccttcacggacataaaggacaaatatgcctaaaaaatcccccgccgtaaatgacgggggattttttacttttccagcttgcgcataacgctgttatacactcgctcgttgacgaccttcaagctgtccatcagctcgtccatgatctcccatgccttgtccggtgaaacatctgccactgcgcgcaggaa

SEQ ID NO: 35448 - DNA, 260 bp, Unknown
  Description of Unknown: RightRegion for integrase B9449 sequence
cgctttatccggagaattgacgcagatgacgacggcgcgttttttgtaacgccccgttaggcatatttgaccttggtgttcccaaaggtaaattatgcccaaaagaatccccccgtcgtaagacgggggggtgttctcatttttcgagcttccgcatcacgctgttgtacacgcgctcgttgacgatttttaggctgtccatcagctcgtccatgacctcccacgctcttgccggagccatgtcggagacggccttcaaa

SEQ ID NO: 35449 - DNA, 260 bp, Unknown
  Description of Unknown: RightRegion for integrase B9450 sequence
cgcttcatcaggcggattgatgcagacaacgatggcgcgttttttgtaacaccgcgttaggcatattttaccttcatggacataaagggcaaatatgcctaaaaaatcccccgccgtagatgacgggggatttttcacttttccagcttgcgcataacgctgttatacactcgctcgttgacgaccttcaagctgtccatgagttcgtccatcacttcccacgcacgggccgggtcaacgcgggccaccgcgcggaggaa

SEQ ID NO: 35450 - DNA, 260 bp, Unknown; identical to SEQ ID NO: 35362
  Description of Unknown: RightRegion for integrase B9451 sequence

SEQ ID NO: 35451 - DNA, 260 bp, Unknown
  Description of Unknown: RightRegion for integrase B9452 sequence
cgctttatccggagaattgacgcagatgacgacggcgcgttttttgtaacgccacgttaggcatatttgaccttcgtgttcccaaaggtaaattatgcccaaaagaacacccccgccttacgacgggggtgttctcatttttccagcttccgcattacgctgttgtacacgcgctcgtttacgattttaaggctgtccatcagctcgtccatgacctcccacgctcttgccggagccatgtcggagacggcctgcaaaaa

SEQ ID NO: 35452 - DNA, 260 bp, Unknown
  Description of Unknown: RightRegion for integrase B9453 sequence
attcgccggattgtagtttcagaaaacggcgacatcttttttgaacttgtttggctataaagaaccttaacacctgttaatgtataatatagctaaataggggatgcattatgcaccccctaaaatatagtttactgctttttcagctttgccagcggcagagattatcatagttggatcattttttagaactcgcatccaactttgaagatatgcagcgctatttcggaaagaagctcttgtttctatccctacatggg

SEQ ID NO: 35453 - DNA, 260 bp, Unknown
  Description of Unknown: RightRegion for integrase B9454 sequence
cgcacgattcagcgcatcgacgcagacaatgacggtgcgttttttgtaacgcccagttagttttattttcatgtcgcgttccctacgttaaaatataactaaccccccggcatttccgaggggttaagtttagctttccaatttccgcatgacgctattataaacccgctcgtttaccactttcaagctgtccatcagctcgtccatgacctcccacgcacgggttgggtcaacgttagataccgcccggaggaaatcgc

SEQ ID NO: 35454 - DNA, 260 bp, Unknown; identical to SEQ ID NO: 35193
  Description of Unknown: RightRegion for integrase B9455 sequence

SEQ ID NO: 35455 - DNA, 260 bp, Unknown
  Description of Unknown: RightRegion for integrase B9456 sequence
cgctttatccgaagaattgacgcagatgacgacggcgcgttttttgtaacgccccgttaggcatatttgaccttcgtgttcccaaaggtaaagtatgcccaaaaggacacccccgccttacgacggggggtgttctcatttttcgagcttccgcatcacgctgttgtacacgcgctcattgacgatttttaggctgtccatcagctcgtccatgacctcccacgctcttgccggagccatgttagagacggcctgcaaaa

SEQ ID NO: 35456 - DNA, 260 bp, Unknown; identical to SEQ ID NO: 35192
  Description of Unknown: RightRegion for integrase B9457 sequence

SEQ ID NO: 35457 - DNA, 81 bp, Unknown
  Description of Unknown: RightRegion for integrase B9458 sequence
cgctttatccagagaattgacgcagatgacgacggcgcgttttttgtaacgccacgttaggcatatttgaccttcgtgttc

SEQ ID NO: 35458 - DNA, 260 bp, Unknown
  Description of Unknown: RightRegion for integrase B9459 sequence
cgcacgatccagcgcatcgacgcagacaatgacggtgcgttttttgtaacgcccagttagtcttattttcatgtcacaacgtctacgttaaaatataactaaccccccggcatttgccgagggggttaagtttagctttccaatttccgcataacgctattgtaaacccgcgcatttaccactttcaagctgtccatcagctcgtccatgacctcccacgcacgggctgggtcaacgttggacaccgcccggaggaattc

SEQ ID NO: 35459 - DNA, 260 bp, Unknown
  Description of Unknown: RightRegion for integrase B9460 sequence
cgcttcattcggagaattgacgcagatgacgacggcgcgttttttgtaacgccacgttaggcatatttgaccttcgtgttccaaaaggtaaattatacctaaaagaatcccccgccttacgacgggggtgttctcatttttcgagcttccgcatcacactgttgtacacgcgctcattgacgatcttgaggtcgtccatcagctcatcaatgatctcccacgccttgtccggtggcacatcagccaccgcccgtagaaag

SEQ ID NO: 35460 - DNA, 260 bp, Unknown; identical to SEQ ID NO: 35194
  Description of Unknown: RightRegion for integrase B9461 sequence

SEQ ID NO: 35461 - DNA, 260 bp, Unknown
  Description of Unknown: RightRegion for integrase B9462 sequence
cgctttatccggagaattgatgcagatgacgacggcgcgttttttgtaacgccccgttaggcatatttgaccttcgtgttggataccgtgtagccaaaatagcgctggagcgtctcaaggtcgccgcggtcccatgcgacctcgatcgcatggcgcacagcgcgctcgacgcgcgagggcgtggtgctgtagcggcgcgcgacctcgggatagagcaccttcgtcacggcgttgatgacatccatgtcctgcacggcgat

SEQ ID NO: 35462 - DNA, 260 bp, Unknown
  Description of Unknown: RightRegion for integrase B9463 sequence
cgctttatccggagaattgacgcagatgacgacggcgcgttttttgtaacgccccgttaggcatatttgaccttggtgttcccaaaggtaaattatgcccaaaagaatccccccgccttacgacgggggtattctcatttttcgagtttccacatcacgctgttgtacacgcgctcgttgacaattttaaggctgtccatcagctcgtccatgacctcccacgctcttgctggagccatgtcggagacggtctgcaaaaa

SEQ ID NO: 35463 - DNA, 260 bp, Unknown
  Description of Unknown: RightRegion for integrase B9464 sequence
cgctttatccggagaattgacgcagatgacgacggcgcgttttttgtaacgcctcgttaggcatatttgaccttggtgttcccaaaggtaaattatgcccaaaaggacacccccgccttacgacgggggtgttctcatttttcgagcttccgcatcacgctgttgtacacgcgctcgttgacaattttaaggctgtccatcagctcgtccatgacctcccacgctcttgctggagccatgtcggagacggtctgcaaaaa

SEQ ID NO: 35464 - DNA, 260 bp, Unknown
  Description of Unknown: RightRegion for integrase B9465 sequence
cgctttatctggagaattgacgcagatgacgacggcgcgttttttgtaacgccacgttaggcatatttgaccttggcgttcccaaaggtaaattatgcccaaaagaatccccccgccttacgacgggggtgttcttatttttcgagcttccgcatcacgctgttgtacacgcgctcgtttacgattttcaagctgtccatcagctcgtccatgatctcccacgccttgtccggtgaaacatctgccactgcgcgcaaaaa

SEQ ID NO: 35465 - DNA, 260 bp, Unknown
  Description of Unknown: RightRegion for integrase B9466 sequence
cgcttcatcaggcggattgatgcagacaacgatggcgcgtttttcgtaacgccccgttaggcatattttaccttcacggacataaagggcaagtatgcctaaaaaatcccccgccgtaaatgacgggggatttccctattccagcttgcgcatgacgctgttatacactcgctcgttgacgaccttcaagctgtccatgagttcgtccatcacttcccacgcacgggccgggtcaacgcgggccaccgcgcggaggaaat

SEQ ID NO: 35466 - DNA, 260 bp, Unknown; identical to SEQ ID NO: 35448
  Description of Unknown: RightRegion for integrase B9467 sequence

SEQ ID NO: 35467 - DNA, 260 bp, Unknown; identical to SEQ ID NO: 35356
  Description of Unknown: RightRegion for integrase B9468 sequence

SEQ ID NO: 35468 - DNA, 260 bp, Unknown; identical to SEQ ID NO: 35459
  Description of Unknown: RightRegion for integrase B9469 sequence

SEQ ID NO: 35469 - DNA, 109 bp, Unknown
  Description of Unknown: RightRegion for integrase B9470 sequence
cgcacgatccagcgcatcgacgcagacaatgacggtgcgttttttgtaacgcccagttagtcttattttcatgtcacaacactaactgtatatccgaaatatttttgca

SEQ ID NO: 35470 - DNA, 260 bp, Unknown
  Description of Unknown: RightRegion for integrase B9471 sequence
cgctttatcaggcggattgatgcagacaacgatggcgcgtttttcgtaacgccgcgttaggcatattttaccttcacggacataaagggcaaatatgcctaaaaaatcccccgccgtaaatgacgggggatttttcacttttccagcttgcgcataacgctgttatacactcgctcgttgacgaccttcaagctgtccatgagttcgtccatcacttcccacgcacgggccgggtcaacgcgggccaccgcgcggaggaa

SEQ ID NO: 35471 - DNA, 260 bp, Unknown; identical to SEQ ID NO: 35348
  Description of Unknown: RightRegion for integrase B9472 sequence

SEQ ID NO: 35472 - DNA, 260 bp, Unknown
  Description of Unknown: RightRegion for integrase B9473 sequence
cgctttatccggagaattgacgcagatgacgacggcgcgttttttgtaacgccacgttaggcatatttgaccttggcgttcccaaaggtaaattatgcctaaaagaacacccccgccttacgacgggggtgttcttatttttcgagcttccgcatcacgctgttgtacacgcgctcgtttacgattttcaagctgtccatcagctcgtccatgacctcccacgctcttgccggagccatgtcggagacggcctgcaaaaa

SEQ ID NO: 35473 - DNA, 260 bp, Unknown
  Description of Unknown: RightRegion for integrase B9474 sequence
cgctttatccggagaattgacgcagatgacgacggcgcgttttttgtaacgccacgttaggcatatttgaccttcgtgttccaaaaggtaaattatgcccaaaagaatcccccgccttacgacgggggtgttctcatttttcgagcttgcgcatgacgctattatagacgcgctcgtttacgattttcaaactgtccatcagttcgtccatgatctcccacgccttgtccggtggaacatctgccactgcgcgcagaaaa

SEQ ID NO: 35474 - DNA, 109 bp, Unknown
  Description of Unknown: RightRegion for integrase B9475 sequence
cgcttcatcaggcggattgatgcagacaacgatggcgcgtttttcgtaacgccgcgttaggcatattttaccttcacggagtttaccgtatagccgaaatacttctgca

SEQ ID NO: 35475 - DNA, 260 bp, Unknown
  Description of Unknown: RightRegion for integrase B9476 sequence
attactttttatcccgaccgaaagtataatattcaggtcggcgatattttttggcgttaaaattacttacttaattgattttgttaccggtgtatagctgataatatttgcccttttgtgcaataaggtcatcatgagttccgcgctcaatgatacgtccctgctctaataccatgatacagtcgctgttcttaacggtagacagacggtgcgcgataacaaatgttgttcttccgtgcatcagcttgtccataccatcc

SEQ ID NO: 35476 - DNA, 260 bp, Unknown
  Description of Unknown: RightRegion for integrase B9477 sequence
atcacctttacccccgaccgaaagtatgacattcaggtcggcgatattttttggcgttaaaattacttacttaattgattttgttaccggtgtatagctgataatatttgcccttttgtgcaataagatcatcatgagttccgcgctcaatgatacgtccctgctctaagaccatgatacagtcgctgttcttaacggtagacagacggtgcgcgataacaaatgttgttcttccgtgcatcagcttgtccataccatcc

SEQ ID NO: 35477 - DNA, 260 bp, Unknown
  Description of Unknown: RightRegion for integrase B9478 sequence
attactttttatcccgaccgaaagtataatattcaggtcggcgatattttttggcgttaaaattacttacttaattgattttgttaccggtgtataactgataatatttgcccttttgtgcaataagatcatcatgagttccgcgctcaatgatacgtccctgctctaagaccatgatacagtcgctgttcttaacggtagacagacggtgcgcgataacaaatgttgttcttccgtgcatcagcttgtccataccatcc

SEQ ID NO: 35478 - DNA, 260 bp, Unknown
  Description of Unknown: RightRegion for integrase B9479 sequence
attactttttatcccgaccgaaagtataatattcaggtcggcgatattttttggcgttaaaattacttacttaattgattttgttaccggtgtataactgataatatttgcccttttgtgcaataagatcatcatgagttccacgctcaatgatacgtccctgctctaagaccatgatacagtcgctgttcttaacggtagacagacggtgcgcgataacaaatgttgttcttccgtgcatcagcttatccataccatcc

SEQ ID NO: 35479 - DNA, 260 bp, Unknown
  Description of Unknown: RightRegion for integrase B9480 sequence
gaagaggctagaaagcgttctttgaagcaatgggaaaatataaaaagggagggtaagtaaatggcaaaagtaacagttattccttccactaaagttagtacattctctaatgcctttaatcctgtggttaaaagaaaggttgctgcatacgctcgagtttcaacagatagtgacgagcaatttacatcttttgaggcgcaatgcaattactatgaaaactacattaattctaaacctgactgggaattagtcaaggttta

SEQ ID NO: 35480 - DNA, 260 bp, Unknown
  Description of Unknown: RightRegion for integrase B9481 sequence
cgcttcatccgccgaattgtcatcgcaaacaacggtgatatcttttttgatcttgtttagttatatagcactttaacaccagttacagtataatatagctaaacattccgaacagcgccggggttgatctccggcgttttcttttgaaaaatttgtggtttttgtaaacttcttattgacgaatcaccaaattggtggtagtataataagcgtaaggaagaaaaatacagaggggcagcgccccggaaaggatcaaaaaa

SEQ ID NO: 35481 - DNA, 260 bp, Unknown
  Description of Unknown: RightRegion for integrase B9482 sequence
cgcttcatccgccgaattgtcatcgcaaacaacggcgatatcttttttgagcttgtttagctatagagtactttaacaccggaaacggtatagccaaaaaacttttgcagcgtctccacatcaccgcggtcccacgcgacctcgatcgcgtggcggatggcacgctctacgcggctcggcgtcgtggaaaacttcttcgcgacctccggatagagcaccttcgtcacggcgttgatggcgtccatgtcgttgatcgtgag

SEQ ID NO: 35482 - DNA, 260 bp, Unknown
  Description of Unknown: RightRegion for integrase B9483 sequence
tggacagaggaaatgaaacaagccgcacgagaaaggaatcagaaatgggtcgaaaagtaactgtaataccgccaacaatcagtctgcaaacgcacctgccgacaacacagaaagtaaagcgaaaagttgccggatatgcacgtgtttctacagattttgaggagcagctcacttcctacgaggcacaggtcgattattataccaagtatattcaagagcgtgaggactgggagtttgtcaaagtctataccgatgagggc

SEQ ID NO: 35483 - DNA, 190 bp, Unknown
  Description of Unknown: RightRegion for integrase B9484 sequence
gatgtgtctgctgccatccatgcaaaaagttcggatgtggcatattctgcttcaccatgaaaaaaatcccggtgcgttacacgggcgctcataagacagtaattctaaaaattacgactatggcatctgtcaggcgggattggcaacgaaataacgggtatccggtgaaagccggatacccgttattttt

SEQ ID NO: 35484 - DNA, 260 bp, Unknown
  Description of Unknown: RightRegion for integrase B9485 sequence
cgcttcatccgccgaattgtcatcgcaaacaacggcgatatcttttttgatcttgtttagttatatagcaccttgacaccggaaacggtatagccaaaaaacttttgcagcgtctccacatcaccgcggtcccacgcgacctcgatcgcgtggcggatggcacgctccacgcggctcggcgtcgtggaaaacttcttcgcgacctccggatagagcaccttcgtcacggcgttgatggcgtccatgtcgttgatcgtgag

SEQ ID NO: 35485 - DNA, 260 bp, Unknown
  Description of Unknown: RightRegion for integrase B9486 sequence
cgcttcgtccgccgaattgtcatcgcaaacaacggtgatatcttttttgatcttgtttagttatatagcaccttaacaccagttacaatataatatagctaaacattttagagaatcgccggagttaatcttctgcgcatttgaaaatttttctgtttttcactttctggttgacattgtacgcacaatggtttacaatacaatcgcaggggcgagagatgaacgccctaagaaaggaagaacaaccatgaaaaacaatg

SEQ ID NO: 35486 - DNA, 260 bp, Unknown; identical to SEQ ID NO: 35482
  Description of Unknown: RightRegion for integrase B9487 sequence

SEQ ID NO: 35487 - DNA, 260 bp, Unknown
  Description of Unknown: RightRegion for integrase B9488 sequence
cgcttcatccgccgaattgtcatcgcaaacaacggcgatatcttttttgatcttgtttagttatatagcaccttaacaccagttacgatagaatatggctaaataatcaagagtagcgccggggtcgatcttctgcgcatttgaaaaattttctgtttttcactttctggttgacattgtacgtacaatggtttacaatacaatcacagtggcgagagatgagcgccctaagaaaggaagaacaaccatgaaaaacaatg

SEQ ID NO: 35488 - DNA, 260 bp, Unknown
  Description of Unknown: RightRegion for integrase B9489 sequence
cgcttcatccgccgaattgtcatcgcaaacaacggcgatatcttttttgagcttgtttagctatagagtactttaacgccagttacgatagaatatggctaaataatcaagagtagcgccggggttgatttcttttgaaaaaattcttgttttctaaaatttcttattgacgtatcaccaaattggtggtaatataatagacgtaaaggataaacaaccacatgggcacagcccggaaaggaaaccaaaatgaaagttat

SEQ ID NO: 35489 - DNA, 260 bp, Unknown
  Description of Unknown: RightRegion for integrase B9490 sequence
cgcttcatccgccgaattgtcatcgcaaacaacggtgatatcttttttgatctcgtttagctataaagtaccttaacaccagttacaatataatatagctaaacattcagaacagcgccggggttgatctccggcgttttcttttgaaaaatttgtggtttttgcaaaacttcttattgacgcatcaccaatttggtggtagtataataagcgtaaggaagaaaaatacagaggggcagcgccccggaaaggatcaaaaa

SEQ ID NO: 35490 - DNA, 260 bp, Unknown
  Description of Unknown: RightRegion for integrase B9491 sequence
cgcttcattcgccgaattgtcatcgcaaacaacggtgatatcttttttgatcttgtttagttatatagcaccttaacaccagttacagtataatatagctaaacattcctaacagcgccggggttgatctccggcgttttctttttgaaaaattccatttttccaaaatttcttattgacatatcaccaacttggtggtaatataatagacgcaaacagaaaatacagaggggttgagccccggaaaggaacaaaaaatg

SEQ ID NO: 35491 - DNA, 260 bp, Unknown
  Description of Unknown: RightRegion for integrase B9492 sequence
cgcttcatccgccgaattgtcatcgcaaacaacggtgatatcttttttgatctcgtttagctataaagtaccttaataccagttacaatataatatagctaaacattcagaacagcgccggggttgatctccggcgttttcttttgaaaaatttgtggtttttgcaaaacttcttattgacgcatcaccaatttggtggtagtataataagcgtaaggaagaaaaatacagaggggcagcgccccggaaaggatcaaaaa

SEQ ID NO: 35492 - DNA, 260 bp, Unknown
  Description of Unknown: RightRegion for integrase B9493 sequence
cgcttcatccgccggattgtcatcgcaaacaacggtgatatcttttttgatcttgtttagttatatagcaccttaacaccagttagtgtataatatagctaaataattcagagcggtgccggggttgatcttctgcgcttttgtaaattttctggttgacattgtacgcacaatggtttacaatgcaatcacagaggcgagagatgaacgcccgaagaaaggaagaacaaccatgaataatgacattctcaaaaattttg

SEQ ID NO: 35493 - DNA, 260 bp, Unknown
  Description of Unknown: RightRegion for integrase B9494 sequence
cgcttcatccgccgaattgtcatcgcaaacaacggcgatatcttttttgatcttgtttagttatatagcaccttaacaccagttaatatataatatggctaaacaatttagagaagcgccggggttgattccaggcgcttcttctttgcttataggtcgtttagtttgttcatgaccgcggcgtaggtctttggctgcatcacgctcaggctctccatcagctcatccatcacccgccatgcgtctcgcggctctttgtc

SEQ ID NO: 35494 - DNA, 260 bp, Unknown
  Description of Unknown: RightRegion for integrase B9495 sequence
tggacagaggaaatgaaacaagccgcacgagaaaggaatcagaaatgggtcgaaaagtaactgtaataccgccaacaatcagtctgcaaacgcacctgccgacaacacagaaagtaaagcgaaaagttgccggatatgcacgtgtttctacagattttgaggagcagctcacttcctatgaggcacaggtcgattattataccaagtatattcaagagcgtgaggactgggagtttgtcaaagtctataccgatgagggc

SEQ ID NO: 35495 - DNA, 260 bp, Unknown
  Description of Unknown: RightRegion for integrase B9496 sequence
cgcttcatccgccgaattgtcattgcaaacaacggcgaaatattttttgatctcgtttagctatagagtactttaacaccagttacagtataatatggctaaataataaatagtagcgcggggttgatctccggcgttttctaacgaagcattgaaaattgggagaacggcgtttccaagccgccggaatatgttgtacgactaatcgcgttctatcttgtgaacaaggaaaaggagggatgaaaggccctccttttcgc

SEQ ID NO: 35496 - DNA, 260 bp, Unknown
  Description of Unknown: RightRegion for integrase B9497 sequence
aatcagcatgaactggagtttcatttgataggtggattaaagtttaaagaaaaaatatagctgaaaatgctttgcaggtaaaattgcaaggcagttttttgttgctgttggtaatagcttttcagcagaaaatgtgatattattgtagtctgaaaggaggcaatgtcatggcaaagaatcgtacaatcccattcggatactgtatgaaaaacggcgagataacaaccgagccaaaagaagtttacgcagttgttgcaata

SEQ ID NO: 35497 - DNA, 260 bp, Unknown
  Description of Unknown: RightRegion for integrase B9498 sequence
acgataaaaaccgagggcatgaaaaaccttatgatggagatggaacatgaacacaattaaaactctgccggatgggaacatccaaatcaccgtcgattatgttttcgtcaagcgttccggacgcaaagagattatcatggaggaggagcagggaagaactgaaaatcttgacatgggcgtcatccgtgcattggcacgggcaaaatactggaatcggaaactggatcgcggtgaatattctaccatccatgatatttccg

SEQ ID NO: 35498 - DNA, 260 bp, Unknown
  Description of Unknown: RightRegion for integrase B9499 sequence
gaaagctggacggcggaaatgcgagagaaagcgaggcagaaaaaatggcgacagtcctaaaaataccagcaaagtttcaccccataacgcatttgccggaaatcaaggttcagaaacgcagagtggcagcctatgccagagtttccacggattccgaggagcagcagacctcctacgctgcacaggtagattgctacactaagtacattcaggaacgggcagactgggagtttgttgcagtctataccgatgagggcatt

SEQ ID NO: 35499 - DNA, 130 bp, Unknown
  Description of Unknown: RightRegion for integrase B9500 sequence
aacaccggaaaattcagaccaatccgctttagcggatattcagactcgtcattcctgtaaatttcaatttccttaatcaaggctgtgaccacatttctcttttcttcgtcatttattatattataaacgc

SEQ ID NO: 35500 - DNA, 260 bp, Unknown
  Description of Unknown: RightRegion for integrase B9501 sequence
ccggaaatgaaagaaaaggcacgacagcagtcactggcaagaaggaggcaaaaatcatgaacactgcggttcggacggttacggtgataccaccgtccatcaaccccatgacccacctaactgacacgccgctttacaaactgcgagttgctgcttacgcccgtgtttccacggacagcgatgagcagttcaccagctacgaagctcaaatcgactactacacgcagtacattcagagaaaccaggaatggacattcgta

SEQ ID NO: 35501 - DNA, 260 bp, Unknown
  Description of Unknown: RightRegion for integrase B9502 sequence
gtaaaagaaatcatcgcatacccagacggtacgttttcatttgtgttgcgtaatatataatatgtgctgcccggtggcatgccttttatgacgctcgaatacgtcctcaagcaacacggtcttacccccggtgtggatgtggaggtcatcaacaacatccagtttaacctgatgggcggcgcatttgagagcggcaccggcgatttcgttactctttttgaaccgacagcctctgaatttgaagccgcaggcaaaggaca

SEQ ID NO: 35502 - DNA, 260 bp, Unknown
  Description of Unknown: RightRegion for integrase B9503 sequence
atgcgcaaatctgccggagaaaaaacacgggaaaggaataaacgccatgccgaaagctaaaaatgtcaccgtcatccccgccacgctgaatatccataccaaaacacctaccacggaacgggtacgccgccgggtagcggcttatgcccgtgtttccacggacagcgaagagcagctcacttcctatgaagcccaagtagactattacaccaagttcatccgggaaaatccggattgggacttcgtggaggtctataccg

SEQ ID NO: 35503 - DNA, 260 bp, Unknown
  Description of Unknown: RightRegion for integrase B9504 sequence
gaagatggcagcgtactgccgagtgtcaaccgaccaagaagaacagttattaagctatgagaatcaggtcaattattacacaaattatatcagcgaaaatcctctctatgaatatgcagggacttatgcggatgaaggaatttcgggaaccaataccaaaaagagagatgaattcaaccgtatgattgctgattgcagggcagggaaaatagacatgattattactaagtccatttcccgatttgcaagaaatacgctgg

SEQ ID NO: 35504 - DNA, 260 bp, Unknown
  Description of Unknown: RightRegion for integrase B9505 sequence
caagcacaggctaagaaagaatctgaggatattgttgaactggacaaagcccaggtatgagtgcaaatccaacaatcacaggaaacctgctaattcacacgttccattgtagattgaagtcccattcctggaagcgattctgggattatgacaccttcgtggtgtagtccagggaaatccaccctgcgccagatttcagtttaccccacttcgttgctccctgcccagtactttcctgcacgatggtataaactccaccg

SEQ ID NO: 35505 - DNA, 260 bp, Unknown
  Description of Unknown: RightRegion for integrase B9506 sequence
acggatgaaatgcggcagaaagcgagagaccggacaaaagcgaggaatcagaaaaaatgacggaaaggattgtgaccgtaataccggcaacgaaagcaccgattcacatgattgccggttcgtctgcaaaaaaaaacgccgggttgccggatatgcaagggtatccacggaaaaagacgagcagtacacttcatacgaagcgcaggtggattactacacacagttcatccagagccatgccggatgggagtttgttaagg

SEQ ID NO: 35506 - DNA, 260 bp, Unknown
  Description of Unknown: RightRegion for integrase B9507 sequence
aaaagacaggtaattgaattatctgctgaaataggacgctctttacttggtgagagctgattcgctcccgatatactgtcagtttctattgataatacaaacgatttactccattaaaagaaattgaattaaatgatataaagttcaagcttgccaatcagcaaaatgcgatgggtaagcttgatttttattactcacaattcaaaacatgggctgatgaatttgataactccacaatggagcagaagaaaatgatagct

SEQ ID NO: 35507 - DNA, 260 bp, Unknown
  Description of Unknown: RightRegion for integrase B9508 sequence
ataaaggagatcactctccatcccgatgccggcatttcttttagcctccgtcagttataatcggcgtagccaaggggttataccgattataactgacaaaagagaccggagaccggtctctggctctatatcatattagtatgcccaacctctcggcaagcagctcccgccgcgcttgcggtattggtttgatcccagcgcaccaggagtgtacggcggccttgctcacctcgcaggcctcggcggcctgctccaacgtc

SEQ ID NO: 35508 - DNA, 260 bp, Unknown
  Description of Unknown: RightRegion for integrase B9509 sequence
atatccgaaattagcccgagcggcagggacttttttaacattaccgtccgtaaaccataatggacattgcccggtggcatgccttacatgacactgtgttacgttctcaagtcccatggtcttgtgccgggcgaggatgtggaggttatagacaacatacagttcccgctgatgggcggcgcgttcgagggcggcacgggggactacgttactctgtttgagcccacggcgagcgagttcgcttcgtccggcagggggca

SEQ ID NO: 35509 - DNA, 260 bp, Unknown
  Description of Unknown: RightRegion for integrase B9510 sequence
atcaagagcattaccgtacatcccgacagttcgttttcctttacccttcgtcagttataataagtagttcccggcggaaataccatttatagctgacatgaaaagccactgtagctgttggctgtttgatctggcccggaaaatacctactcatcaaagaccaaagaagaacaccatgcgctgcatggtgttcttcttcggtatccggcagctacccgttttttattcagttccttgcagtttctcgtccgtaaaaagcg

SEQ ID NO: 35510 - DNA, 260 bp, Unknown
  Description of Unknown: RightRegion for integrase B9511 sequence
gaacgtagcagcgtattgccgcgtatcaacagatcaagaagaacagttatcgagttatgagaatcaggtgcgatattacactgaggtgataaccagaaatgcggagtatgaactggttgatatttacgccgatgaaggtatctccggaactaacacaaaaaagcgtgatgacttcaatagaatgattgcagattgcagagccggaaagatagaccttatcattacaaagtccatttccagatttgccagaaacacgctgg

SEQ ID NO: 35511 - DNA, 260 bp, Unknown
  Description of Unknown: RightRegion for integrase B9512 sequence
gaaagtagcagcgtactgccgcgtgtcaacggaccaagaagaacagttatcaagttatgagaatcaggtgagatactatacggaaatcataacaagaaatcctgattatgagttagcagatatttatgcggatgaaggtatctccggtaccaacaccaaaaagcgtgatgattttaataggatgattgaggattgcaggggtgggaagatagacctcattattacaaagttgatttccagatttgcaagaaatacactgg

SEQ ID NO: 35512 - DNA, 109 bp, Unknown
  Description of Unknown: RightRegion for integrase B9513 sequence
ttaattaaaaagatagacgtatggaacgataataaaattaagatccactggaatatttaatttttgggcgctttacgccttttttcgtatattaggtatttacaattga

SEQ ID NO: 35513 - DNA, 260 bp, Unknown
  Description of Unknown: RightRegion for integrase B9514 sequence
gaaagtagcagcgtactgccgcgtgtcaacggaccaagaagaacagttatcaagttatgagaaccaggtgcgatactatacggaaatcataacaagaaatcctgattacgagttggtggacatttacgcagatgaaggcatctccggtaccaacaccaaaaagcgtgatgattttaacagaatgatcgaagattgcagagctgggaagatcgaccttattattacaaagtccatttccagatttgcaagaaataccctgg

SEQ ID NO: 35514 - DNA, 260 bp, Unknown
  Description of Unknown: RightRegion for integrase B9515 sequence
aaagagtatgaagaacaaatcaaaaagactgccgagttcattcaaaagtatgaaaagtaaaaaattgacagagtaataacagaagatgaaatcagagaacaaatcaatcatctcaaagattacttttacaaccctaagaatttaataagaacaaagtatgttctttctcagtatatagacagaattgacatctcaaacgaaaatgttcaggtgcaattcaaagtatcaatgtccccatcagataatactgatggggattg

SEQ ID NO: 35515 - DNA, 260 bp, Unknown
  Description of Unknown: RightRegion for integrase B9516 sequence
gatggaaggcttcagataaagttttatgacggaacagagtttgaagtagcaacagaatagtaaaagagccggtaggtaaattaattagaattatgagcgtagttcctaccggtttttgtattattacatatcatattggctgaggtccatttggcctccaggttcatcttccgcattttgggcggctaattcttcttttgtaatagcattttgaggctttgcacctttgtttgaatatagctgctcgaacttgagaggtt

SEQ ID NO: 35516 - DNA, 260 bp, Unknown
  Description of Unknown: RightRegion for integrase B9517 sequence
cagtcgctttctgaagtcactgagaggggtttaatagatgttgatgaggttatcatatagttgagattctatcgtcagtagcgcttgttaggattcacagaaagcttcttcaaagtactacctgtaccagcattattaagcacctttgaagcttgctcattagcggcatctgagaaggtgctttttccgttctcaactttgacacttctaccacaattgatacgggcttgaagttgctcattagtaagttcactcgtaga

SEQ ID NO: 35517 - DNA, 260 bp, Unknown
  Description of Unknown: RightRegion for integrase B9518 sequence
ggtttaataaacagaatatatttagacgggaataagatatctcatgttgattttaattgaataaagtatggctttcgatggtgtcatttgtagatgcgggtcgtaaagccatacttttttaatgttcattttgtatacataatcgtatataatacctaaaaggaaatggacaatatgacaaataaagattcaataaataaaatattatctatgttagaaagcgtaaagaatgaaatagagtcaattaggcgcgacttaaa

SEQ ID NO: 35518 - DNA, 260 bp, Unknown
  Description of Unknown: RightRegion for integrase B9519 sequence
gttggaacggacggaaagctgaccttcacgcttcggaatggcatggaaattgaagtgtaaatatatatttttaggggctgtggataccaatgtgatgcttctcacactggctcatccgcagccccctctttttttgcctatttacagccatttccgagtttcgttacaaaagtcaacgataaccccaaaaacagctcaaaatgcaccctaaatgattttcgatttttcgcaaaaatcaacgatagcttgggtaatcgttg

SEQ ID NO: 35519 - DNA, 99 bp, Unknown
  Description of Unknown: RightRegion for integrase B9520 sequence
caacacattgagaaactaaagcaggatgttgcaaaagaggagttaaaaaaaggcttataggacaaaaagtgtgtgtggcttttttaaattaatcccaat

SEQ ID NO: 35520 - DNA, 260 bp, Unknown
  Description of Unknown: RightRegion for integrase B9521 sequence
ggcttctttgtaattaaacctcgaaaggatggaaacaatgagtatcttagacaactttgatgtggttggcgtccctcgtacattcagtattgcagaggttcgaatcctgaagaaccgcatctcctttaaccttgcaacggcttctgagattggctatccgccatttgtgcggctgttcatcagcagagacaaaacacaaattgcattgcagccctgtgccaaagaaacaccgaacgcaatgaagttctttacgtcggatt

SEQ ID NO: 35521 - DNA, 260 bp, Unknown
  Description of Unknown: RightRegion for integrase B9522 sequence
cacctcgcggatggaaccatgacaccagtggggttaaccagtgaggggaggctggcatgaaccgcaccgtcaccgcgatacccgcaacaaagaaacttgggaatctcacagcctcatctggcgcaccggcacgcaggcgggtcgccgcctacgctcgcgtctctaccgagatggaagaacaaacctcctcctacgaggctcagattgactactacaccacctatattcgctcacgtaatgattggcagttcgcgggcatg

SEQ ID NO: 35522 - DNA, 260 bp, Unknown
  Description of Unknown: RightRegion for integrase B9523 sequence
cacctcgcagatggaaccatgatgccggtgggcttaaccagtgaggggtggttggcatgagtcgcacggtcacagcgatacccgcaacaaagaaacttgggaatgtcacaaccccgtccggggtaccagcgcgcagacgggtggcggcgtatgctcgcgtttctactgagatggaagaacaaacctcctcgtatgaggctcagatcgactactacaccacctacattcgctcacgtagtgattggcggttcgcggacatg

SEQ ID NO: 35523 - DNA, 260 bp, Unknown
  Description of Unknown: RightRegion for integrase B9524 sequence
aaggcaatcgagggcggtgcgctcagcgacacccctcatagagcgcctgaaccagcttgaggcgcagaaggcatccctgaacgacgcgatacaggccgagaacgtcaaggtctcgctgtgcgaggacgagcacagcatcaaggcgtacttcgagaagttccttcacgcggacttcgacaacccgcagacgcgcgataaaatattggaatatttcgtcgataagatttatctctacgacgagaagctggtcgtgacctcgt

SEQ ID NO: 35524 - DNA, 260 bp, Unknown
  Description of Unknown: RightRegion for integrase B9525 sequence
gagaaacagatcattatctgttttgcagaggagaatgaatacaaggtttgcagcttgtgagcggaagtgaacagagggcgatactatttatgctgaaattggaaattagactgaatgcagaacaaatcagtgaaggtggaaaacatactccggaagttttatatgggatgttgattcgagcatttcaaaaagaacagatagattatagtgaaaagccggatgaaacagtgctttttgtaggacgaggatgtaccaaagat

SEQ ID NO: 35525 - DNA, 260 bp, Unknown
  Description of Unknown: RightRegion for integrase B9526 sequence
gaggaaatttttgcaaaaaaaatagccactacgcaaaacaagctattgaactgcttgtaaaacgtgtgacaatcattgataagactattaccttgagcctgacaacagaaggttgtctgagcttattggtgccgcggactcgaaatggtataagcgcatatactttcaccattaccgtgaatttagcagcttagggctaaaaggcaggagtaattcctgcctttttattatatcacgttcgtaccaacattgcaattaaa

SEQ ID NO: 35526 - DNA, 260 bp, Unknown
  Description of Unknown: RightRegion for integrase B9527 sequence
aaacgaggggcttttctcgatgtttcacgtgaaatctatgctgttcgccgccacatgtaaacggccaaatatggcggcatgttgttgtgcgaaccgtccccgcctgtgtagagcgtctgaacgttgccgttgtacccgactttcgcctgtgcttggacggtcatgtaggccgtcgtattaccagcggaaacgttgtagttgtcgagtgtgtggttgtggcgcggcatctccgatgtcgtgagcttgtgcgccgattcgcc

SEQ ID NO: 35527 - DNA, 236 bp, Unknown
  Description of Unknown: RightRegion for integrase B9528 sequence
aaaatatacccaagaaagcaaagaaatatctacacaagaaattttagatacaaaagctaaactgatatatatattagaaaattatgatctagatgatgtacaatctataaggaagattttaagaatgttgataaagaaaataaaaattaatgatataaaaaaatttgattttttaatagagttgtgatatcctaaaaatagagaaattaaataaaatattatcttcagggcagggt

SEQ ID NO: 35528 - DNA, 260 bp, Unknown
  Description of Unknown: RightRegion for integrase B9529 sequence
gtttcccggcttgaaacacacgcactggagcttttgcgggccggatgggagcagccttagcttcctcttgcattcctcaccgaactgtggtacaatactaaggcacacgaatcgtgtgccttgtcggacagcgcctgctgcgtggttcggcatacggatgcgggtcctgtacgatggagccgcagtgaaccaggtcaggtggggaaccaagcagccttaagcggcgcgccccgtgcgtttcagtcagcctgcatccgtat

SEQ ID NO: 35529 - DNA, 75 bp, Unknown
  Description of Unknown: RightRegion for integrase B9530 sequence
aaacttctgactggaaacaccttcctcaacagatttctttgctggagctgctggctgtgaacttccagatgatga

SEQ ID NO: 35530 - DNA, 260 bp, Unknown
  Description of Unknown: RightRegion for integrase B9531 sequence
gaccccgcctcggccgttgccgaggaggacgaaaactttattgtaattgagaaggagtaactaccatgtttgagaaattttctgtcatcgatcttattaaaacccgttccgcctctgtctgcactttcgcaggcaatgttgtgaagttcaatgtgcagaccgcacaggagctccgcttcccagagtacatccagttcctgatcgagccgaagtcgaagcagtttgccatccgtgcctgcaaggaggacgctccgaatgcc

SEQ ID NO: 35531 - DNA, 260 bp, Unknown
  Description of Unknown: RightRegion for integrase B9532 sequence
gaacccgccccggccgttgccgaggaggatgaaaactttattgtaattgaaaaggagtaactaccatgtttgagaaattttctgttatcgatcttattaaaacccgttccgcctctgtctgcactttcgcaggcaatgttgtgaagtttaacatccagaccgcacaggagctccgcttcccggagtacatccagttcctgatcgagccgaagtcgaagcagttcgccatccgtgcctgcaaggaggacgctccgaatgcc

SEQ ID NO: 35532 - DNA, 260 bp, Unknown
  Description of Unknown: RightRegion for integrase B9533 sequence
gatatcgatgagagtaaattagattctcaaagacccatgaagacaattgttattatttgatgattagagatgggaggggttgtttcccctcccatttcatcttttatattaattttttgacattattataatgatctatgatctataatgaaagtagatcataccatacattaattaagaaaggtggttatttgttatggatagtttcactagtaagattactgttgctgctactctgttaggcaatggtgctgagtact

SEQ ID NO: 35533 - DNA, 260 bp, Unknown
  Description of Unknown: RightRegion for integrase B9534 sequence
gagatcagagagactaccgaaaagatctcagctgaaagaaaaaatggtcagtatgagtagaaaaaagaatttgtttatgagaatataaaaaaacttgccgacatctgggatgatatcagcaagtctcaaaaaaactctatactcaaaactataattgataaagtgattataggcaagggcgatatagaaattcagctaaaaaacttttagcacttacataatgcagttcctatggcattgaggtggtgctataccgcata

SEQ ID NO: 35534 - DNA, 260 bp, Unknown
  Description of Unknown: RightRegion for integrase B9535 sequence
atacagaacggctataaacacatgcttagaagtaacaatgacatggaaaatgagctgtgaaatgcaacttatacagaattaagagctgaaagagaacagcttatggataaactgtcttgtattgataaagctgatgatgatttttacaagcaatctgatttaatattgaagttctgtaagaatgcaagcagaattttcatggaagcaactccatcagaaaaaagaacaatttgtgaaataattggttcgaactttacagc

SEQ ID NO: 35535 - DNA, 260 bp, Unknown
  Description of Unknown: RightRegion for integrase B9536 sequence
gccgcaacgccagctatggcagatcacatcgaaattattaaagtcaaaggagaaaactaatatgtccgtactcgaaaaattcaagctcgtagagctcatcacctctcgcaccgactccgttgccacctttatgaacggcaaccagatcaagttcaatgccgccacctttgtggatctgggatacccggaatacatccagctcttcgtcgaagagaaaggcaagcagttcgccatcaaggcctgcaaggcagatgcgccgc

SEQ ID NO: 35536 - DNA, 260 bp, Unknown
  Description of Unknown: RightRegion for integrase B9537 sequence
gccgcaacgccagctatggcagatcacatcgaaataattaaagtcaaaggagaaaactaatatgtccgtactcgaaaaattcaagctcgtagagctcatcacctctcgcaccgactccgttgccacctttatgaacggcaaccagatcaagttcaacgctgccacctttgtggatctgggatacccggagtacatccagctcttcgtcgaagagaaaggtaagcagttcgccatcaaggcctgcaaggcagatgcgccgc

SEQ ID NO: 35537 - DNA, 260 bp, Unknown; identical to SEQ ID NO: 35535
  Description of Unknown: RightRegion for integrase B9538 sequence

SEQ ID NO: 35538 - DNA, 260 bp, Unknown; identical to SEQ ID NO: 35535
  Description of Unknown: RightRegion for integrase B9539 sequence

SEQ ID NO: 35539 - DNA, 260 bp, Unknown
  Description of Unknown: RightRegion for integrase B9540 sequence
aactccataaatgaggagatgtcaaacaacaaagaagtaaggattgaggaatttaagtagcagatcccggaagactggaaagaactttacgaacaactagatcaaaaaggaaaacaagaattttggcatagaataataaaagaaatttatttgaatgaagcctttgaaattactggctttatattttatatctaggacttgtactaagtaactattttctagcggttaacattaattagtacaagtctattaaaaatggc

SEQ ID NO: 35540 - DNA, 260 bp, Unknown
  Description of Unknown: RightRegion for integrase B9541 sequence
accgaaatcgtcacttcacctatgttggaggacgaaaactttatgattgaaaaggagtaaactactatgtctattttggaaaaattcactgtcatcgacctcattaagacccgttccgcatccgttgccaccatcaccggcaatgttctgaagttcaacaaccagaccgctgctgaactgcactacgccccgtacatccaggtgctgatcaacccgaaggataagcagttcgccatccgtggctgcaaggaggatgctcc

SEQ ID NO: 35541 - DNA, 260 bp, Unknown
  Description of Unknown: RightRegion for integrase B9542 sequence
gtactaattgatcatgttgatatttatgaagatactacttttaagataatatatagtaactaatcctttatattctcctttagctatgcgaaaatgtagtatagaaagggagaattttatttatgcaaacactacaaaagccttatgatgaatgggaaagttaccatgatattgagaagtatggaagactaatcctatcaaacattgaatttaccactactaatttgtgcaacatgagatgcgcccattgtgctgttggt

SEQ ID NO: 35542 - DNA, 260 bp, Unknown
  Description of Unknown: RightRegion for integrase B9543 sequence
atacaggtgtataacgaaagaaaaaaatataaagtattctataatgacagtaacactaactaatgagatattattacaattaaaagaaaaaataatcgacaagattgaaatttatgaagatgctacatttaaaataatatacaacacataacactttatattctcctttacctatgcgaaaattaatgtatagaaagggagatttttttatgcaaacattaataaagccttacgatgaatgggaaagttaccacgatatt

SEQ ID NO: 35543 - DNA, 260 bp, Unknown
  Description of Unknown: RightRegion for integrase B9544 sequence
tcatacacaatcacatttcatttcatctgcgggttgattctcacagaggaagttggagcgtaggggcggctgtggacaacagcggcaggatgccagggtgacatcttccacagcgcagaagcagaaacgtggaacggcagacacaggtaacaggagagcacagagttgagcagacggtacggctacaggattagaaacgggaaagcgttcatagagtcatcagaggcggcgaacatcgtcagtttcttcaccctgtatgc

SEQ ID NO: 35544 - DNA, 260 bp, Unknown
  Description of Unknown: RightRegion for integrase B9545 sequence
ccgccggaacataaggatatcattgaggtgccgccgagcgataccggagaggaggtgccgtgatgtcaagagatcctgccagaagcagaccgctttcggcaaacgtgaagcgtatgatgtggcttgaaagagctgcaccgcgcaatacgaaggtcctgaatgctgaaagaatctggacagagaatgattatatctactgtcataagcaggggcagttgtttatggaagcggctgctatgggcttttcgatggaatccttt

SEQ ID NO: 35545 - DNA, 260 bp, Unknown
  Description of Unknown: RightRegion for integrase B9546 sequence
aactacaaatttagattaaatatgggtgttggtaaattagaaattgtaacaccattcatttaattaaatcataattacactaaagcttgtgtaatcaaaattaaacaactatgtttgcatcgtcttaacaacaactggaaaaaattaaatatattattaacatataacaattaacattatggcagcacctagcgatttttacaattattttcaagcaatcaaagaaaatcaaaaattagttgatgaattgaatttaacag

SEQ ID NO: 35546 - DNA, 260 bp, Unknown
  Description of Unknown: RightRegion for integrase B9547 sequence
cggcttcacctgcggatcgatcgggaatccgcacagcttcgaacagtcctgactgccgcgtgacatcaagggcacgctatgattcgaacgtatcttcgatccttctacctgagtgcttccggccaaaccgctgtgatcgcgtcatgacggttagttgacacttgacacccgatcctgcgggtatctatggtcttggtaggcaatcacgttcgcggcgctagaagggtcgagattaaatgccacgaccgaggacactgcct

SEQ ID NO: 35547 - DNA, 260 bp, Unknown
  Description of Unknown: RightRegion for integrase B9548 sequence
cggtgtccgatctgcggcgaacagttgatcgcttgcgaacacgggccaaacgggaaagattgataggaaggggctttcgccccttctttttaacagttaccgtttacaaccggtcttacaatctggtattcgatgaaggtcttcgccatgatttcggctaactctttatcaataccctgtttgattaagtcttccttgtatgctttctttgctcttttctctgctactgtcatttttttatttccgcctttccttaactt

SEQ ID NO: 35548 - DNA, 260 bp, Unknown
  Description of Unknown: RightRegion for integrase B9549 sequence
attggaattgattatccattaaataatatagaaaaaataataagttttacagagttattttaatttattttttatatctaaatcggggttgtaaatgccccgattttttatttcttcttttgtaatttttttacaatattcgtctatttcacttggtagcatttctttaatttgcttttttgtaagccccatagaatgaattaaataatattctgtagattcgtcaacaatcatattaactcctaatgaaattattatag

SEQ ID NO: 35549 - DNA, 260 bp, Unknown
  Description of Unknown: RightRegion for integrase B9550 sequence
gatgcttggactcctgaaatgaaagaaaaacaatcaaaacttattttagaaaggaatttataatttatgaatcaaactattaacaacacaactaatgaaaacaaaatcacaaaggtagcggcatatttctgctattatgctgaccctacaaacccatcaaaacagtatgatgagcagtacgaatactacaaggaaaaaatcacaagtaaccctgactacgaatttacgggcatatatgctgatgaaacttcaactaatac

SEQ ID NO: 35550 - DNA, 260 bp, Unknown
  Description of Unknown: RightRegion for integrase B9551 sequence
actgtgtgcggatcagatgtcggagagggaacagaggagaacagagatcgagcagacctttgattatgatggctatcaggtcgcccggagggaactttttgcacatcttcgagatcccgccattataataaggaaagacagcatcacattcaacacggcctgcattgcaggtttggaggatgtggtgtacgtcaacatcatgtttaacagcgacttaaagcggcttgtagttaaaggctgtaatgaaaatgacagggatg

SEQ ID NO: 35551 - DNA, 260 bp, Unknown
  Description of Unknown: RightRegion for integrase B9552 sequence
tatatgaagacggagaaaggcaacaatgacagcattgtgcttgatgtgtgttggcttgtttaattgctcgaatgtgcgtgaattcgttgtcatcatcgatgcgcacattcatcgagcattcgaggagtacaacgatttgacatacaaaaagaaaagcggagaaaatctctccgcttgtttctgtttacatgagtcctgctttgctctttgtgattgttcctctgatgttgctgattcctgcgacaacaatcaacggaagt

SEQ ID NO: 35552 - DNA, 260 bp, Unknown
  Description of Unknown: RightRegion for integrase B9553 sequence
atggagcagcctgaacgaccggtcgttcacccatcggagcagaagtggaaatacgggtcctgagaaccctcaggaaaaccgagacaggtaagcgcagcgttggatagctgcgcttatctgtctgggcttgtgcgaggctctatgggcgtctctggcactgtctttggacccacgcggccagcttgtcattggccggtcgaatatgcgttgttcgccgctgtttcaagaaacgcatcaaacgcgggttagcttggctgatc

SEQ ID NO: 35553 - DNA, 260 bp, Unknown
  Description of Unknown: RightRegion for integrase B9554 sequence
ttagaggagaaggaagaacctgcggaaacaactgaagaacccaacgataaggtagcggtttaagactcacccctgcactgaaggcttcagggcctccggtgtgggggatttttttgtgtctccagtcattcgttcattgaattttcagatatcttaagtggctattcggagggtggtgtggtatactaaagtagaagtagtatatattgatttaaggggagtataatgagcgaattagataagactcagtggcacccggc

SEQ ID NO: 35554 - DNA, 260 bp, Unknown
  Description of Unknown: RightRegion for integrase B9555 sequence
attgaaatggctttaaaagtgcctgtaaggcagatatacagagcttatcagcctgaaaattaatatcagtcgtaaagggttaactatggcaccttgggaataaccctttacgactgatattacaaacagtaagtggggctcctataattgatgattttaacatgtttctccctggaactcgtaggcaaatccctttggttaactttaatcaagtttttctaacttgtttaatatccgctcgatcgaacgttcctgagatt

SEQ ID NO: 35555 - DNA, 260 bp, Unknown
  Description of Unknown: RightRegion for integrase B9556 sequence
tgtccatcggaaaaagttgaagcaattatccaggcgcttaggcactttcagatgattgaatgagaaaaaacggcccacgctgtttgcgtgggcctcactttcttaacctattaactttaccggcaaatcaattgctggctttttatatacggcaaatgttaccgacccgtcagcaaccgtggcatagccgctagacaccatgctgtaagccttagcatacgccttactgcttacagatgatgacagatcggcgctaaacg

SEQ ID NO: 35556 - DNA, 260 bp, Unknown
  Description of Unknown: RightRegion for integrase B9557 sequence
tctgatttagttttatataagaaagagcaaacagaagatgaagaggaaagctctgaagattagctaaagcttcgtagcatttcgaagaaaggctacgaagcaggaatttgactttgtcaaaattcctaaccccctatgagttttgacatgctatcaaaactcgggggctctgcgaggcatcgaattagcgacaaattttataaaaagcacctaatatttggaacaaaatagtacctaattttgttccaaataagtacata

SEQ ID NO: 35557 - DNA, 260 bp, Unknown
  Description of Unknown: RightRegion for integrase B9558 sequence
tatgatttgccaattttaccaaaagcaagaaaaagaaatactccttatttaataggggaatgatagggtaggggagtggattaaaataaaaaaaggaataagtggtttaaactcattcctaatgggttgttaaattttactatttttattttgctctttctttaatttttttgcctcacgttttgctcttccttctgctaatcttttttcttcactatctctatattctctaatttttttatcattaaattctttggtta

SEQ ID NO: 35558 - DNA, 260 bp, Unknown
  Description of Unknown: RightRegion for integrase B9559 sequence
ctgctcaagcgtgaggattttgaaatcgtagtgaatgaagatttgattgattggatagattaactcagtggttttagaagctatcattatagatttgatcactctcaactataaaattattaaagaattataaatcgagagtgatcaaaacaaccaaaaccctctcgtttgagcatgattttgatgtctccgaataaatatctatagataaattatgaggagcattaaatgaactttctaatagaagtactcgcagccat

SEQ ID NO: 35559 - DNA, 260 bp, Unknown
  Description of Unknown: RightRegion for integrase B9560 sequence
gctgacagcagaataacattccgcttcaaagacggaacggaaattgaggttggggctgaataagccccgcctttttttcttttaggacaattgcgtatccttccttctgttgtcggcatagcaggctcgaccgcagaatttacgctttggatttgcagtttcaaaggaacgcccgcactgtacacaggtgattgtatagagcgtcctgtccatctgctcttggtgctgcgcccaccacttcatgcggcaggcatcggagc

SEQ ID NO: 35560 - DNA, 260 bp, Unknown
  Description of Unknown: RightRegion for integrase B9561 sequence
gtgcattccaaggatgcaatcgacattcactttttggacggaacaatcgtcaaagtcagataaatacagcattttttaagattgcaaaagtaaggttgcaattggggagtgtaccccttttgcaaccttactttaatgtaacaaaaataatatttccttcttttttacgcacggagagttttttctttttgcactctgtgggagcgtaaagtattaagggcatcttctcttgccctgtcatcagcctctctggctgccat

SEQ ID NO: 35561 - DNA, 260 bp, Unknown
  Description of Unknown: RightRegion for integrase B9562 sequence
tgtaaaatagatggctacaaggctgaggtggctacactatccaaatcatttgacaatcggtaaatggtatatgtatcagtaaagcccattgttgtgttctgcgttgattttgatgaaacgcctgttaatgcgggtttccgctatcgtgtttatgtatcatacgttatctaatgtatgttacatataccatttaccaattgtcaaacaccaaccacccaataataaatttagggtatacccttttttctatattccttggt

SEQ ID NO: 35562 - DNA, 260 bp, Unknown
  Description of Unknown: RightRegion for integrase B9563 sequence
gagctgcgccaatatctggaggctttcaatattatcaagaaggaggacgcagccaatgagtgaaaaagcgaatcagcaggtgctgtctaatcttctccgcgccatggacacgtctgctccgagggaaccgggcaatgtgccgggcaccagtaatcgagagcctcacgaggagatcattgaattgggtgatggctttgactttgagggttttcaggtggttcgaagggaattcttcgcccacacctttgaacccgctgtca

SEQ ID NO: 35563 - DNA, 260 bp, Unknown; identical to SEQ ID NO: 35553
  Description of Unknown: RightRegion for integrase B9564 sequence

SEQ ID NO: 35564 - DNA, 260 bp, Unknown
  Description of Unknown: RightRegion for integrase B9565 sequence
gttggtggaagatggaacaaagaagcaaccgttagtttagaggttgaaacctatgatttttaatgttctaattgtaggggcaatcatatatactttgttatgcccctattcttctgtacctttattatatcagtgataacaaccataaggagaacattgatttataggcattttaaaagaccaaggatttttgcttggtcttttttttaaaaaaagaatgtctttactagcacattctctttatcaaaacacatttattc

SEQ ID NO: 35565 - DNA, 260 bp, Unknown
  Description of Unknown: RightRegion for integrase B9566 sequence
atttctttgaaattgcccttattcagccgtgtaacgaatagcagtttccgtgtaactaattaatcattttctttgttatcgcacttacatataacctgctgttatctgctttgtgatccctatgatgccccagaaggggcgttcaaattccttctagtggagttcaattatatcaatgggtgcgtctttagccacgaaaggaacctcttttgtctaccaagacaagagaggtttctctttacagaaaaataaccccatgg

SEQ ID NO: 35566 - DNA, 260 bp, Unknown
  Description of Unknown: RightRegion for integrase B9567 sequence
gaaacaattattgatgatatgaaacaggaggtcagtgatgaacgatcaaactctgatgaatgaaatggaaatacttgaagtagatgattttaactttgacggctatcaggtagtacgcggagagttctttgcccacatatatgaaccgtcaattacatttaacaattacaaagtaggcgttaatacagcctgcataaagaaactaccagaatatgactatgtgcagattctggtaaatccggaagataaaaaacttgctg

SEQ ID NO: 35567 - DNA, 260 bp, Unknown
  Description of Unknown: RightRegion for integrase B9568 sequence
cagcttggtatttcctccatgcttgcagaaatggataatagaggagtggatagcaatgaatgagaattaccagtttgatcctaatggcgcatttcgagcacagcgagaagtgcccaatgatgttgttgtgtcagaacctgaaaatgatgtggtttctgatgatgcattttcttacgatggttatcaggtggtccgtggcgagttttttgcccacacttttgaaccctcgatcaccttcaacaattgcaaggtatctgtaa

SEQ ID NO: 35568 - DNA, 260 bp, Unknown
  Description of Unknown: RightRegion for integrase B9569 sequence
cgattcatagctgagcaattagcccccataaagcagaaggaagaggtggattttaatgcctgaaaaaaacgatatcccaacctttcggaatcttgatggagtgtactaccgtgtgattcgtgatggtatacatgtcaaccgatgcttttctgatttgtccgaagccgagcaggatgagatcatggcagagtataacgcggaacaactcagacggctttgtcgctttctcagcatgagcctacgccagattggaaatgcgc

SEQ ID NO: 35569 - DNA, 260 bp, Unknown
  Description of Unknown: RightRegion for integrase B9570 sequence
gatgaagaacaaaaggaaagtattaaactagacatctatttaaacaatagatttaaactataattaaattctgtgttgggtgggtgtaacttcataacacctattcaacactataccaaagttataactttataacataggaatagataaggaggaacatatgcaaaataagtgtattaatcttagatggagaaagaaacaaggcaagacctattgttattgtaccaaaaaacgagccataatagaactttcaagttgtt

SEQ ID NO: 35570 - DNA, 260 bp, Unknown
  Description of Unknown: RightRegion for integrase B9571 sequence
ggctttgacgtacttaaaaaatacatacacgccgaattaagcggtgtttcattacaggagtaaaacgaaatggatgagatgaatgaaaaaaaagatgttttagcaggattattagaaaaggtgcaggacgattcccctgccgatctgcctaccccgtcttcggacgagcaaacgcctaaattaaaggaaacggatgaattacttgatatgagtgaagactttgacttcgacgacttccaggtcgtaagacgtgaattctt

SEQ ID NO: 35571 - DNA, 260 bp, Unknown
  Description of Unknown: RightRegion for integrase B9572 sequence
tgggaattaaacggccacgtcttcgttacggctggttcttctggcgagcgttgtcaatcgtaatagaaatcttcgtcatattgtccagcatcgccttcttaacggcatcattgatggagaggcgcccaataaagtccttctgctggctaatcgtgcgcctcatgaacgcaaaagcctccggtttgaaacctagagttatccgcccccctgagtccgacattttaaaataagttaatcaggccgatcttctttttcacatc

SEQ ID NO: 35572 - DNA, 260 bp, Unknown
  Description of Unknown: RightRegion for integrase B9573 sequence
cagcggacagcctacctgatgagcgacatcgaaacgctcgcagcggaacgagggacggcgtgacgcggattggccgtttatgtaatggacgggattacccccaagccctagaatgaggactcgactcgtgaccccccagatccacaaactgagacgccgccaccgatccgtgaacggcgggaggaaactgggctacgtccttttccccaccggcttgcccgacgtgcgctggatgggaccgtacgacagcagccccgaag

SEQ ID NO: 35573 - DNA, 62 bp, Unknown
  Description of Unknown: RightRegion for integrase B9574 sequence
aaagccatcacggcctgtaatacccgacggcatccgcggccgttatcccggcggagcgcatg

SEQ ID NO: 35574 - DNA, 260 bp, Unknown
  Description of Unknown: RightRegion for integrase B9575 sequence
aataagcgtccacaagatagaatacacaagtggtatgatattttgattgagatttatttctaagaatatagagtgtcatctaatatggtggcactctattgttttgcgcaaaaaaataagggcaacagatttctccattgccctcaaacatcaaccgttgtttatctgatttctaatcagacaaagactcttgattaagttgtttaaaatttcttcgtcaagcgtaccagtcaatgaaacgctatccgtttccttatctg

SEQ ID NO: 35575 - DNA, 260 bp, Unknown
  Description of Unknown: RightRegion for integrase B9576 sequence
gaagatgaaactgagtttagagaatatatgagtactaaatttggtactgagtttgaagattaaaactgaaaaggctactagaataatattgtagccttttttatttaaaaaaatcattaactttgagccttaataactaatcaatcaaatattatggacataaaatttaaagacaatccaattacaattaaaactattgaagttgatggcaagaaattaacaaagcagttgttgcaacagattgaaatagatgatttgca

SEQ ID NO: 35576 - DNA, 260 bp, Unknown
  Description of Unknown: RightRegion for integrase B9577 sequence
ctgaagtccaagctcgtcagggaggggtgggagcgtgacaggaacgacggcctgatacaatagcctcgaaaaaaaatatttcacaagcaggacgtacaaggagatacgtcattcatggcaatcaacgatcaaatctttcgattatacgcggagtataatagaagcgtgggcctgatcagcctatgcaattcaagcgaacgtggtgggcgattattcccttaaatcggttttttcccgtccttccagccatggttcgcatt

SEQ ID NO: 35577 - DNA, 260 bp, Unknown
  Description of Unknown: RightRegion for integrase B9578 sequence
gaagctatagataaattcacacttacacctcatttaaagatactaattgatgaaactgaataaataagcaaaaaaagaaacccttgatattaaagggtttttttgatgggttttttcaatgataattaaaaggtacgtactcttacgtatatttattatataaatgataagtacaacgatttaatcatcaatattcaagtaatatcttttaatatcacttttgctaaagcgtttcattaattcttttaaatcatttcttt

SEQ ID NO: 35578 - DNA, 260 bp, Unknown
  Description of Unknown: RightRegion for integrase B9579 sequence
ggtaaatacttacgtaagaatcaatggtctgacgcaattattgatgtcgcagtagaactataaagagttctattaatgtccaaacgatatataatacctcatggtgtgagaaatcataccgtggggtattattttatctacaattcataaacgtaaaaaatagggtaaccagaaattaatctgattaccctataactatttattcttctaatttatcgtggtcaaacccaacactcattaattttttatatttatcattt

SEQ ID NO: 35579 - DNA, 260 bp, Unknown
  Description of Unknown: RightRegion for integrase B9580 sequence
tggataaaagatggcattacatcttctataacattgctctctagtgatccaaatctagattgatcttcttgaattagatattcaagccaaagagataaagagttttgaaaactcagcatttggagattgcttatttctgataaatttaatgttacttcgtttaatacattattatcattattcattatgagttcctattattattttatttattataatgtgaaagatctaaaagatctaaaggattgtttctttctaat

SEQ ID NO: 35580 - DNA, 260 bp, Unknown
  Description of Unknown: RightRegion for integrase B9581 sequence
aaacgagaacttagatacaggcaaaaatactgtttaaaatatctgattacagttgcattataacacaagacaccaataaccgtaaaaaaataggagcgaacacctctttatcgagatgtttactcctatttttttacggtcaatttgtttacggttagtttgtaaactttttaactaacatattataagttctgttgtctatcaagccttgtttaagcaacatttttgagagcgcaatcatatgagcttctttaataatt

SEQ ID NO: 35581 - DNA, 260 bp, Unknown
  Description of Unknown: RightRegion for integrase B9582 sequence
tcattttctacaaaacataggatatataattgggaagacctaaatataactgtgtatttgtaataacggtagggcggattgaagtgattcatttcgccctgcttttttgtttctaaatatatgcgcaaaaaaatgggactgcaaggtacaaaaaccctgtagtcccataattattatgtcttataaatcctcaaaactgaacatctactttgtgacaaaactcatgtttcatcatttttatcgtctttgtcgctgcttct

SEQ ID NO: 35582 - DNA, 260 bp, Unknown
  Description of Unknown: RightRegion for integrase B9583 sequence
ttgagtgggatagtaaacggtttatccagctttgatatgataagcaaacgaatagtattttaagagaagaagccccgctaaaaggggggcttacttcactattgcttatacttttctccttttagcgtatcttccttcaatgagattctcccgctcaagaagcgcaatcttgacgcttgcgacgcaggctccacggggactatgacattcggcaaagtctctaatagatttcatagcttcgcatgagagttcaagcggtt

SEQ ID NO: 35583 - DNA, 260 bp, Unknown
  Description of Unknown: RightRegion for integrase B9584 sequence
atgcgtgaagcagttagtgttagagaaaaagaaaggtggtcaaaagtattatggcaaaggtaacaattatcccatcaacaatcgatcctagaacacatttaccaacaatgagtactaaaaagcgaaaggttgctgcttatgctcgtgtttcaacggatagcgatgagcaattcacatcatatgaagctcaagttgattattatacaaaattcattaaagcaaatcctcaatgggagtttgtagaggtatataccgatgaa

SEQ ID NO: 35584 - DNA, 260 bp, Unknown
  Description of Unknown: RightRegion for integrase B9585 sequence
gagaagttgaaagaaagtctggagaatttaaaaacgaaagctggttcacttgatggaacataacgaatcggattatctattcaataatagtattcctatagaggaatcaacatcagcggaaactgaagttgttgacttagccggttatcaggttacgaaagctgagctgtttgcgcacactagagagccctcaattaccatatgggaaacaaggatgaagtttaacatggcatgtctcagacgctttccaggagtacaat

SEQ ID NO: 35585 - DNA, 260 bp, Unknown
  Description of Unknown: RightRegion for integrase B9586 sequence
gcatattcaacacggcacagaatacacaaatggaatgacatacacatttcagtattcatttaataacctactaagggctatgaggcttcggtcttgtagcccttatttttttaccatttcggcagtaaacaccacttattgccgatatgctactaatggagacatatacacacctaagcgcaaaaaaaaaatagcgggtctatcaaatcaatgatagcccgctaaatatgtttatttgctgaatccgcgcacatcttcaa

SEQ ID NO: 35586 - DNA, 260 bp, Unknown
  Description of Unknown: RightRegion for integrase B9587 sequence
gacttgacaatatcaccgttccggaaagacgtgatttcgttgggcatttcaaaagtagcatagaggacgcgcccctgcccgccctcagaccccccaccaaatcgccccagcggcccgcccatgcgttggcacggccagcccttgcccggcctattggctcttgggcttgcgcttgctcttgcccctgggttggcgtggccgatcccaataggggttcttgcatttggggcagaccgccggcgggtcattgatattgcgcg

SEQ ID NO: 35587 - DNA, 260 bp, Unknown
  Description of Unknown: RightRegion for integrase B9588 sequence
tttaatgaaatgatggaaatatgtgaaactaatggatgggaaatagattacacctataagtaatcccactacggctttcatatcttatctttaatccagtcttaacggactggattttttgttatcatcttatctaggattccatcttgataacagaaatatacattgaatgaataaaacatatcgttaaagtttgcttctttttcgattatctataaaaaactttgtatctttgcatccgaatttcaccgtctatagta

SEQ ID NO: 35588 - DNA, 260 bp, Unknown
  Description of Unknown: RightRegion for integrase B9589 sequence
cagataaggagggagcggcattggaacagcaaaggaaagtccaaacaatcccagcaaccctgacgcggttttcggccactccgatctccgcgcagaagaaacgaagggtcgccggatacgctcgcgtctccactgatcacgacgatcagttcacgagctatgaagctcagattgattactacaccaattacatcaagggccgggacgattgggagtttgtgtccgtgtacaccgacgagggcatcacgggcaccagcacc

SEQ ID NO: 35589 - DNA, 260 bp, Unknown
  Description of Unknown: RightRegion for integrase B9590 sequence
tatgcacctttaccgacaattgtcctcccatttgatgcctcagatgtggcctgcgcagcatgatcaccggcacaaaacagccgttttcgccgaggattggtgggcacaatacgattcatgagcactatccagaacacccctcatacgtgttatcggcaaaagaggtgagaaatgtcaataccagatgaccatgtaaatcggttcgagcaggggatgcagtatatggcccaatcctttcactctgcggtggagaagtttgg

SEQ ID NO: 35590 - DNA, 260 bp, Unknown
  Description of Unknown: RightRegion for integrase B9591 sequence
aaagccgaccgcatcgatatggctttgaaggccagcaagcgtattcgtgaagcactggcttaaatcgccagtgcagtagcccacaaatcgtcaacggcttccgctgacagcccaagcgctcccgcaatcacaagcaaagccggagcaaggcgagtaaacgaggtagcatattcccactcgatttccgcttcgtctcgtgccggtcccgctggcagcgcatcgattgccgaatacaccgccgcaagcgaagtacccgaacg

SEQ ID NO: 35591 - DNA, 260 bp, Unknown
  Description of Unknown: RightRegion for integrase B9592 sequence
gcttccggctacttttcactggttgagcaccaattttcggcccgtttgtggcgcaccgcataatctgtaattattttgtaatctttgcgcaaacaaaaaatgccccgccagcaatccgtcaggatgccagcggggcattgctttacttagtggagataccttgccaattcagatgcaacaaagcctgcgatcaatgccgcaatgaccgcccaccagagtttgtttccaaatactccgggggctttttccagcgcggtcaa

SEQ ID NO: 35592 - DNA, 260 bp, Unknown
  Description of Unknown: RightRegion for integrase B9593 sequence
gcctttttcacacaggccgtcagcggctgcatttcaggtgtagttgtgttagatgtccgttagaaatatgcagtgctgccgttgctgtgccagctcacagcaggcttccctgtctgaacgcagcgtttcccgaaagccgggaaatgctgcgttttctcttgcccgcattgggctgaaagggaagccgccatgtcaacattccgcgtcaataaaaatgtcaactacaccgtcatgagcaaccaccacctgcaggataagag

SEQ ID NO: 35593 - DNA, 152 bp, Unknown
  Description of Unknown: RightRegion for integrase B9594 sequence
gatataatgcgaatgtccggtggacattcgctcgatcccggctcgacgggatcgacaccttgactatctggacgcctccatcgaggagctcgaacggacggtccaggcgatccccggcgacggacgggtatcctgggatgtgctggaccggc

SEQ ID NO: 35594 - DNA, 260 bp, Unknown
  Description of Unknown: RightRegion for integrase B9595 sequence
aatctcaaaccaacagatagaatccacagatggtatgatattgtgatcgagattattttttaagctatttaattgcctacagttaaagggcgaaaaaagccgcttctgagagtttatctcaaaagcggcttttatttaattacacttttcgaatataattcttgtgagcatatgcgatatgaaaatcagttccattttcaattcgaattctatcccaatctccgacagttccaattactctgacatagttaccattccca

SEQ ID NO: 35595 - DNA, 62 bp, Unknown
  Description of Unknown: RightRegion for integrase B9596 sequence
cagcggcgcaaacaacaggaaagacccaaggacaccgaggaaaatgagacaagtccgttatg

SEQ ID NO: 35596 - DNA, 260 bp, Unknown
  Description of Unknown: RightRegion for integrase B9597 sequence
aagctaacaaaccaagtgataataggtaaaagaaaaatgaagataagagtatacattgtgtgatttttaggtagctactggttagaggtttaatcagtagctaccttttgttttatccccattcttgtcaataaaatgataagtagtagttattttttatatattaaataagtagtgtaaaactgtataaaaaataatgtatatcatacagactcaccttgtgtaatttgggggtggtctaattaaacagattggaggat

SEQ ID NO: 35597 - DNA, 255 bp, Unknown
  Description of Unknown: RightRegion for integrase B9598 sequence
tatcatgctgagtatacaaaggcaaatcgttttaaagatattgtttgcaaaatctatatatagttcgagagggaagcatttgcttccctttcttttatctctcgattaggactaaatccctgaaataaaaaaggatttagtcctttttttatataaaaatattttaaaggagattgattatgaaagtatatgtagtagcaaatttaaaaggtggcgttggaaaaaccaccacaacagtaaacgtagcttatacat

SEQ ID NO: 35598 - DNA, 260 bp, Unknown
  Description of Unknown: RightRegion for integrase B9599 sequence
gcggaagcggccggcttggtgcggaaggtcggaaagaacggcggttgggtttctgcaaagtagatgcaaaatgcgcatcgcctagttgtcgctaagctttttgaacatctcgacgcccgtcattggcacttggtcaagcagcacgtaagacttttcattgaagttcaggaagtgccgaatgtcgtcggcactttccgtccctccgaatacatgctgatcctgctgatcgctagggattttttctgcgaagaatctggaag

SEQ ID NO: 35599 - DNA, 260 bp, Unknown
  Description of Unknown: RightRegion for integrase B9600 sequence
ttgtcgtaccagcgcccgcggctggtttccctcggtgcgtggcgcgaacggagggcggcgtgatgcgacagaaaaccggcacttcagtgaaccctgggttgccaatatcgcaacagcaaaggggacggattattgccttcggcagatggaaggctgcggcgtgattgcaatgcaagaagtgcctgtgccgcagcacataatcacattttgttacattgagcggattgaggaaaatgaaagaaattgctgcgaaatggatg

SEQ ID NO: 35600 - DNA, 260 bp, Unknown
  Description of Unknown: RightRegion for integrase B9601 sequence
accggccattatgtgaacggcaaactatcaagcattgaatatggggctagtattagaacttagagcgcaaaaatacggggctgcgattgcagccctttacttatgccgccagtatatcggcaatatcattcttagacaacgcgcgaataatcttcattttctgagcgattacccaattcacctggtctggagcatagtatactatttcgtaatcagatacttcacactcaacccaaacacgacgttcgccgcgccgcaga

SEQ ID NO: 35601 - DNA, 260 bp, Unknown
  Description of Unknown: RightRegion for integrase B9602 sequence
ggcgccgtgttcttcgcaggcgatgaggacggcctgggggcgggggtggagtggcgggcgtgatatggcgcacatccgcaccttttgccgatgtccctaaacatgcttaagccttaaggtctgaggatacccaagggagaggcctccccttctcatgccactgtcccgctttcgcagcgacgcaatttcagccgagcttgaggccgccgccgttcgattcggccagcacctgcgccgctggcgcatcgctcagggctggt

SEQ ID NO: 35602 - DNA, 260 bp, Unknown
  Description of Unknown: RightRegion for integrase B9603 sequence
accgggcgcccgctcaaattccgacacgccgaggttatggaggctgcacggctgcacggctaacgaccagccgcacccagcccccaggtatgccccaggtatgccccagcgggctgggaccgattggccgttttcctaatggacggaatcacatccgtgacctagaatgaggactcgactcgtgactgaactcgtgaccccccagatccacaaactgagacgccgccaccgatccgtgaacggcgggaggaaactgggct

SEQ ID NO: 35603 - DNA, 260 bp, Unknown
  Description of Unknown: RightRegion for integrase B9604 sequence
ctcggagcaaaggaatataagttcagattccttgatgggaccgtgaaaaaaatgaaagtctgaagtctgaagtctgcaattcgggacaccctcgtgcagacttctttttgtttccccaaaacacaagaaatcccttaaaatggcggtttttccattaaagggacttctgtaactctgaagctatctatgtgatttcagcctttgcattatgcttccttcttagccagcttatcgtcactactctttttatatatgtcctg

SEQ ID NO: 35604 - DNA, 260 bp, Unknown
  Description of Unknown: RightRegion for integrase B9605 sequence
aataaacgaccacaagacaggattcataggtggcagaatctatcggtacagatttatatttaaaaaaggaaagggtataagattcttatttcttatacccttccaattattcacaacgaatactgaacattgctgttcctgtatactgtccggcttgtttccctgttgtatctgatacatatgttgagaatgatttactaataccattatctccataaccaaatgaaacaagattcatatttgtaggctctaaattattt

SEQ ID NO: 35605 - DNA, 260 bp, Unknown
  Description of Unknown: RightRegion for integrase B9606 sequence
ttgtgttttttcatagccataacggatttcgttataatctaccaaaatccagcgagattctaaaatcgttgttagaatctaccgtaaaggagcatggctatgattaggattttactgtccacccggcttggcgagcggaggtggtcacaagctgaccttgcaagggcaacaggcattcgaccttcgacgatcaatgacctgtaccatgagatcgcagaaagggtaaacctggagcatctggatcttatttgtgaggcgct

SEQ ID NO: 35606 - DNA, 260 bp, Unknown
  Description of Unknown: RightRegion for integrase B9607 sequence
gagttactttcacatgtagggtatccagaactagatagtaagatgttttggcctcggaagtagtgggctttagctagcctcgtagcaattctgcggggcttttagcaggtgttaattgtgggtaaaaatatcagcggtaatctaagaatgtgaataagagtatttattatataaaaataggtaaatcaatgctttaggaagggcagcagaatgttttactaaaaaaaaggagaaaagaggcaaagataaatcgattggtt

SEQ ID NO: 35607 - DNA, 260 bp, Unknown
  Description of Unknown: RightRegion for integrase B9608 sequence
gcttcttttggcaacatgggcgggcgtccacgcaaaaaacccgtagggattagtgatggttagggaaacttcccatgacatgtgtaatcctcatgggtttttgcgatctgatcaagtataaagctcaactattgagtgcggcagcatgaactcttcaatatcgggcagcggctctccatagaagcgccgtctggctcgcgacaccttggcatgatatgcccggagatcaggtataaatccgatttcgtcagcgaggtgcg

SEQ ID NO: 35608 - DNA, 245 bp, Unknown
  Description of Unknown: RightRegion for integrase B9609 sequence
gctatgagccagagaatgaaacagataaggagtgagaagcattggtcgtccaaaagaaagtaaccaccataccggcatcgctgacccgctttacggcgacgccgatcacagaattaaagaagcgccgtgtggctggatacgcccgtgtttccactgaccacgatgaccagttcaccagctacgctgcacagattgattattacaccagctacatcaagagccgagacgattgggagtttgtcgag

SEQ ID NO: 35609 - DNA, 260 bp, Unknown
  Description of Unknown: RightRegion for integrase B9610 sequence
cggacagcggcacagcggcgctggcgtgagcggaaacagacaggcgctattgctgaggaatgataggcgcgatgtccttgagattcacgttaagggtgaccgcctcaccagccaaaggaatcgcagccgcgtctgacgctccctgtgcagccgacaattggttgcgtacctcggcagcatcggccacgtcagttggatcgttgagtaccttcatggccgcgccccacgcgtgtccttcatcatcagcccacgctgacaac

SEQ ID NO: 35610 - DNA, 260 bp, Unknown
  Description of Unknown: RightRegion for integrase B9611 sequence
cagggtcgacgtaccgatctcgaaaccttgtcgagcgaggaggcgtccggcatactggcctgagcagtgtgtttgggtgccaactctacgctctgcgcccctggcctgtgaaggtcaggggttttttttgccctgacaaaactgcgttttgttacgagtcctatactcggacttggcccccagacatgaagaagccacgccgagtcgctctggcgtggcttcttgcgaggggccagatcacagcgtggaaagggtctagc

SEQ ID NO: 35611 - DNA, 260 bp, Unknown
  Description of Unknown: RightRegion for integrase B9612 sequence
gcatttttgacgttcgttgtcttccaatttaacttcgtccattatcatttcctttcaaaatgaattgttgctgcataatatgatcggcgacgccttgattttgaatgcaccggaagcgcggatttattttcatttcggccagcacttctttaacaacgccgacaaattcttccaattcgacgccacgttcaacattgaatgttaaagagcaacgccggcgcggtaaatatccgccccatgcgccgttcactttcataacg

SEQ ID NO: 35612 - DNA, 260 bp, Unknown
  Description of Unknown: RightRegion for integrase B9613 sequence
gaacgtgaatctgctaagatgttcgctgtattaagtaatgtaaagttgttctccatagactaaaaagcatcagacacaacattgtatttaagagaactaaaggagtgtgtctgatgctaaatatgaaaagctcttcaattcaggaaacaaacaacatttaaacggcaagagaacctaatggcagaaggagtctctacttaaaaaactgaattgaagagcgaaagagcaatgagctgctaaggacttgaaagagcaaacct

SEQ ID NO: 35613 - DNA, 75 bp, Unknown
  Description of Unknown: RightRegion for integrase B9614 sequence
gggggcggagccgacggggtactcggagaggagcgcgccgttcgcggcgatgtcggccgctaggttgcggtgctc

SEQ ID NO: 35614 - DNA, 260 bp, Unknown
  Description of Unknown: RightRegion for integrase B9615 sequence
tcttcatatacacatattaatgtttacaatgtcgatttttgcaccaccctcccccacaaataacctcactgtttccgcagaaacattacttacccctccatgccgttaccttgttaccgctatgcgttctcctttcaacgcgttccagggtccctgcttgctccatctcaattaatttctttcgcgccgtttgtggagaaacccccagcctttttgccagagcaacagctgtcaattcctttctctcatccaggtacggt

SEQ ID NO: 35615 - DNA, 260 bp, Unknown
  Description of Unknown: RightRegion for integrase B9616 sequence
gacttccgagatgacgaggcacacgttgagacaatagtgttgctacaaagagaaaccttgtagaaatccttagatttaggcacttttcccgccatgtggtgtttgacgcagagggtgataaattccgcaataagcgtattgaggactatatcacggtttcggtagttattgatatggagtgtgggaacacaaaaaactaaatagttgactgaaaaggacatcgtgcaagcggtgtccttttcttttaggcgaaaccgcag

SEQ ID NO: 35616 - DNA, 260 bp, Unknown
  Description of Unknown: RightRegion for integrase B9617 sequence
aggcctacccatggagactccagcgaagacaagcgcttgcagtggttccggcggcttagctgaccgcgttgtccggcttcgtccgggatcgtcaggccgcgtgtggccacgtcgggcagccaccgggcagcaaggcagcaggccatgatcgacccgaacatccgccgcatcttcgaggagaacgggttcggcttccgctacggctgcctggactgcggcgccgcgcgcgcgacctggtgcgaatgcttcctgagagaggc

SEQ ID NO: 35617 - DNA, 260 bp, Unknown
  Description of Unknown: RightRegion for integrase B9618 sequence
atcaattggtgtgtggaagtggtgcgcatattgctctacggtagacaaaggaccaagggatgaaacctcaaaaagtgacgatcctacacccatgcggtcattcagtcgagcatcgctcatcttgtccaagtgcgtttgcagcaagacagcaggagcgcccttgcttggcatgtcggcggaaacaagaacgagcccaagggaggatagccaggaagcgcatggagcgttcgtctctgtatctatgtttaaggatggtagct

SEQ ID NO: 35618 - DNA, 260 bp, Unknown
  Description of Unknown: RightRegion for integrase B9619 sequence
atgagcgaacacatgaagcaattacggaaggagcgtggagacaaatggcgcagagaaaagtaacggcgattccggcgaccatcaccaaatatactgccgttcctattggcagcaagcggaaacgccgtgtcgccggttatgcccgcgtctccaccgaccacgaagaccaggtcaccagctacgaagcgcaggtggactattacacgaattacatcaaggggcgggacgattgggagtttgttgctatctacacggacgaa

SEQ ID NO: 35619 - DNA, 260 bp, Unknown
  Description of Unknown: RightRegion for integrase B9620 sequence
acggtgtacagcgagaagggcatccgagtgacctttaaggatgggacggagatacaggtttaaaggttgttgacgtctacgctacctgaaggaacaccggcccggcctttacagcaacttgattttgaacgaaaagctgtacccgcacctgttggagattgaccgggcggcgcgtgaacggatggacgccatgttgccccgcatgatggaggcggcaggcgtcaccgaggaactgaaagcctgtgaccccatgcgctggg

SEQ ID NO: 35620 - DNA, 260 bp, Unknown
  Description of Unknown: RightRegion for integrase B9621 sequence
atcaaatttttgtatgatggccagaccccggatacagacaaagaacccgtcacagccctttgactgcggcgggttccttgcttatgtccgggtatcattatatatctctttgcatcctgcgtctatatacatcgcatccccgatgcaaactaatgcaggatgatcggccagaaaaccgatccatccggaggggatattcgtattatatcccgccccggatgggtgtcaatgactcaggcagccggttcctcctgattcct

SEQ ID NO: 35621 - DNA, 260 bp, Unknown
  Description of Unknown: RightRegion for integrase B9622 sequence
tattataatccgggcgccatcaagctggtcggtacgcggcgtaagatcgagcgtcatatttaggacacgcctgtctgcaggcgtgccgtaaatatgacattaacaaaccgggatatgtgtaggggtaaccgctaagcggcttgtgcgaggctgcagcgggaggcgtggaccttgcccgccggcgcatggcattccgggcaggtatcgcccagttcgttgaccacggcgacggctgcggcaggctggcgagcggtgccggt

SEQ ID NO: 35622 - DNA, 260 bp, Unknown
  Description of Unknown: RightRegion for integrase B9623 sequence
gcagagggcggtcactctttaacgactgtgacgaccgaggaaggtgtgaccctgacggaatgaaggtggcgtcggggtgagcattcagcacagcatcgcgaatctggcgcttgcagctacctgaagcgaagccgaagcgtatcttgccgttctcggtaaatgagtacttgagcccaggacggtcgcggaccttttgcgccttggcaaggtaaaactctcgacggagccgagcagctgttgcgttatcgatcatgcacact

SEQ ID NO: 35623 - DNA, 260 bp, Unknown
  Description of Unknown: RightRegion for integrase B9624 sequence
agcaataattgttgtagtgatgaacaacaccttttaccgcatgcccagcgtgtcggtccttgaaacatgggccggcgatgtccccccggatttcaaattcgtgctgaaagcatcgcggcagatcacccacatcaagcggctgaagaacgcagccgattcggtatcctatcttctcgaagcggccggaaccctgaaagagcgcctgggggcgctgctgttccaactgccgccgaatatgaaaaaggatgtgccccggttgc

SEQ ID NO: 35624 - DNA, 260 bp, Unknown
  Description of Unknown: RightRegion for integrase B9625 sequence
ggagccaaattcagtcccgacggttttgccgtcggttgggtttactggaagccccgtcgatgacctcgccggggctttcgcattttcgcccagatttcgcgggcacttgcggctcgcgaccccctcgcggcccatcgtcgacggcgaaacagagatcacgatgaccgcggggacacgctcgcaagggccgaaagtgcgctctcgaaggccccgagagcgggtcgagagccgtgatctctgttttactggacgcgcgtttt

SEQ ID NO: 35625 - DNA, 260 bp, Unknown
  Description of Unknown: RightRegion for integrase B9626 sequence
acggtgtatagcaaggatgacgtctgggtgaccttcaaagacgggaccgtgattcaggcataacttcatattttaacaatgcctctcaaccaggatggatgagaggcatctgttttgttagtcatcttcccattggaaatttgcataaccgcaatgagaacatttaatatatccgtccggattattgccgttctcccaaggagcagtataactaccaccacttagtgattgtccgcagttttcacatttcttgccacttt

SEQ ID NO: 35626 - DNA, 260 bp, Unknown
  Description of Unknown: RightRegion for integrase B9627 sequence
gagctttcctcgtggcattttaatcacgagggcgggatgcttgaggggcagtacattccataaccccctgcccggctctctcagggcctcggacacggcaacgcccctgcattgctgcagaggcgtctggctatctcagtgagcgtccgcgcgcgcttacgggcgcaggcaggtgatagtctctccccctacagtcagtacgaactcgtcgggtagtcggacgtagtgaacacgctcgccgtagaactcgaacacacctt

SEQ ID NO: 35627 - DNA, 260 bp, Unknown
  Description of Unknown: RightRegion for integrase B9628 sequence
ggcgcgcagttcttcatcggagacgcagacgggctgggggccggtgtggagtggccggcgtgaccgtatgcgcaatccgcaagaaagtcgggaattaccccactcgggggttgtcctaagtcttaggttggtgttgaggggatcccgtcggcccccctcctccccatggcaccgctctcccgctacagccccgaaagcgtcacccagcagctggcagccgccgccgcggccttcgggtccggcctccgccgctggcgcat

SEQ ID NO: 35628 - DNA, 260 bp, Unknown
  Description of Unknown: RightRegion for integrase B9629 sequence
aaaacttgcattaagacacaagatatggtatttttcaaatataagtaccttttagcactataagagaaaaaaatgggagtggaatcaatgatacatacagcttatgacgtaatgaaagagtttttaatcacggatgcagaccttgatggtaagtacgaaatcccgaaaatcccaaagacttttatccatcctggaaaagatactgtagactttgcggagagctttagccggaagattaagaaccaccgggaactggatgt

SEQ ID NO: 35629 - DNA, 92 bp, Unknown
  Description of Unknown: RightRegion for integrase B9630 sequence
accgttcacagcaaggacgacatccgggtgaccttcaagaacggcaccgaaatcaaaggataacaccacaaaggcaatgagccactgaacaa

SEQ ID NO: 35630 - DNA, 260 bp, Unknown
  Description of Unknown: RightRegion for integrase B9631 sequence
aaaacttgcattaagacacaagatatggtattttttaaatataagtaccttttagcactataagagaaaaaatgggagtggaatcaatgatacatacagcttatgacgtaatgaaagagtttttaatcacggatgcagacctcgatggcaaatatggaatcccgaaaatttcaaaaacttttatccatccagggaaagatactgtagactttgcggagagcttcagccgaaagattaagaaccatcgggaacttgatgta

SEQ ID NO: 35631 - DNA, 260 bp, Unknown
  Description of Unknown: RightRegion for integrase B9632 sequence
gaagtgaggccagatcggattgaggcggctcttaaactgcgaagggcccagccggaagcctagcccctcgcgattagtgaagcctcaagagccggccagcaattggccggctctttcttcaccgaacgccgtcacaaagcccgtcagcagttccgcgaacagcgggtccgtatggtcgagatactgagcctcggcatagatgcgctgtttgcgcgtggtctgctgcgctagcacctgctcgatggtttcggcttccccgt

SEQ ID NO: 35632 - DNA, 260 bp, Unknown
  Description of Unknown: RightRegion for integrase B9633 sequence
acagtctacagcaaggacgatgtgctttttacctttaagaatgggcaggaaatccgagcgtaaggggaaaaaggatactcctcactaccaattgcggtggtgaggagtatcctttttccataagcatcctcttcagttgaatactacgatgtaatctcttgcgaatcggtcaaaggttgcttcggcttccgagaggacatcatccagttcttcattgattttaccacgcacataggcttctcgtagggcaggtctttcga

SEQ ID NO: 35633 - DNA, 260 bp, Unknown
  Description of Unknown: RightRegion for integrase B9634 sequence
ctgatccgccgtattctcccgcttccgcctgctaggtccttgcggcgaaagaggttggcgtgaagaaccgacctgccttctgggtaagggcccgtgacggaatgaccatagcatcctagattttgaaaacaaacctgttcggctgatgtcaggcctccggggggtgatgcccttcgggggcctcgtttcttgagggggggacgccctgtggagtggaagcggttgaccgccagaacgatcgcccgatgtgactgtggctg

SEQ ID NO: 35634 - DNA, 260 bp, Unknown
  Description of Unknown: RightRegion for integrase B9635 sequence
ctaataacggcgcagaacgccgcttcggctgtggagagagggcgaaaccgagcgcgtgcttagaccatttttactggcgcactagaatcaaatcctggtcgggaaagcaggatttcttaaagtgcgttttgattctcattgttttttgatcatggtcaaccataccagtccacgaaacgtccgagtcgcatgtaccccacgtgcccgacccacttcctgagaagacgttgcctgataagtgaaagctaaaaccatacggt

SEQ ID NO: 35635 - DNA, 260 bp, Unknown
  Description of Unknown: RightRegion for integrase B9636 sequence
cgggtctgggctcactgtacggcttcaacccggccggacgaagccctcgccgccgcgtcctgacgttctgcgtctcatcgaacgacccgcccggcgcatcgacgccggacgggtcgttgttcatctacgcataacgtggcggtatgggcactcttggttcttggcgttggtgtagtacacatgggcttggctctagccggtatgtacttcatgactcggtagatagctcagtgtcctaacgagattccgccgcttcgagc

SEQ ID NO: 35636 - DNA, 260 bp, Unknown
  Description of Unknown: RightRegion for integrase B9637 sequence
gaccggcaggacattgctcagcagattgaggaaatgcagaagcgcaggcttgaagccctgtaaagctcgtggaagccctctcgcagaaaaagcgcctcgcttgcttgcgggcgctttttcttttgtatgggcttctgaggggatcagtgacgcggcaattcgtaaactgacacgccgtgttcgatccgaaaatatgcgggatgcctttccacatacaggcgctgttcgcggaagaccaacccgaagcaatcttcctcata

SEQ ID NO: 35637 - DNA, 260 bp, Unknown
  Description of Unknown: RightRegion for integrase B9638 sequence
cgcgtatatgtcgattacctaccctcgcttcgtgaactcgccggggtcttgacgccagcctgacgagctgccaggacctgttccctggcagcgtcggccaacagcttggccaactcgtccaggagctcctcgcgcgtcggcgtgggtggcactcgcggtttcgactcgggcatgccccaccagtgtgcggtgcctcgccccctgccggcgggtcaaatctggacaaatcggaaagttgtccgctactgcaaatcttcggg

SEQ ID NO: 35638 - DNA, 260 bp, Unknown
  Description of Unknown: RightRegion for integrase B9639 sequence
tcggcgctgttgggtgcccaatctgagaacttcagcactttgttatgtccaacgggcacgtgagcgcccccccacgtcctgacatgcccagcacctaggatcgctatcgagacagacgtccacccggtggtcatgccaccgggtgttgtatttcttcttggagtccaaggcccgcatcgcaggagccagcagattgcgaaattctcctaggacgtaggattaagtcgcgttgacgactactacctaggctgctacgctca

SEQ ID NO: 35639 - DNA, 260 bp, Unknown
  Description of Unknown: RightRegion for integrase B9640 sequence
gcctcacccctcgtcctccgctgggccgatctgccccccctggccctcccggccgccgcgtgatggccggccccgccgggtacgcaggtaccgctccaccgcctcgagcaccgtcccgttcacgctgcggtgctcgtccttggcgagccccttcagcgccgccgccagggggttggggaagcggatcgagatgaccgtctcgtcgtctttcggcataccggcagtatagccacagtgccactatttcaatgcaatcgtaa

SEQ ID NO: 35640 - DNA, 260 bp, Unknown
  Description of Unknown: RightRegion for integrase B9641 sequence
aattctataaaaagacagcatcatgaattccaaatcagatatgatgctgaaatatacatataaaataaggctgggatcagtaagtcccagcctttagtttattcgattggatcaagagcatcagcaattccactcatgatataagctacacatggtaccgctaccgaatttcctaatgctttatatcttgaagcatcggattcaggataggtccaattgtcaggaaaaccctggagcctttcgcattccacaggcgtcaa

SEQ ID NO: 35641 - DNA, 62 bp, Unknown
  Description of Unknown: RightRegion for integrase B9642 sequence
acttatggaaaacgcaactatagaagagataaaaaaagcaggacttgctgggcattatgctg

SEQ ID NO: 35642 - DNA, 260 bp, Unknown
  Description of Unknown: RightRegion for integrase B9643 sequence
gccgcggtcgggctcctcgatcttgagctcggcttcacgctcggtctgggcaagtcggcgtagccgcagaaattcccggatagcccgcgccgccgccgcgtcatcgcccaggtacgtgatgctgacgacgcgatagggctgctcgtctggtttgcgcttgggctcggcggtcacggcgaccagtgtgcggccgccgcctgactacctaacagtgcgacaatgcgtccaatcttcagtcgcgggcgtggccgttgcgtcgc

SEQ ID NO: 35643 - DNA, 260 bp, Unknown
  Description of Unknown: RightRegion for integrase B9644 sequence
ataataaaatcaaagagattcgtaattaatttaccggaacgctggcataggaaggtggcgtgatggctggccagcagctggtcccgaagaaggacagtattaatttccattgcaaggcctgcgcttcaggcctcccgcatttttttgaagctgcacccacagaggtcattgacgctccggatcaggagcaccatccctataattatttcgcgccatgccccagctgcggcagccttgccggtcaggtgcaatgggaaaag

SEQ ID NO: 35644 - DNA, 260 bp, Unknown
  Description of Unknown: RightRegion for integrase B9645 sequence
gaagcaaaccccgatctccgcgggcggatctacacgctcggccgctatcgaatggcggcctgatgaatgtgctcgatctcttcagcggaatcggcgggtttagcctcgggctcgagcgagccggaatgcgaaccgtcgccttctgcgagatcgatccctactgccgccgcgtcctcgccaagcactggccaactgtccctgtttggggagacatccgaacccttaccggccaaattattgccgacgccatcggcagtcag

SEQ ID NO: 35645 - DNA, 260 bp, Unknown
  Description of Unknown: RightRegion for integrase B9646 sequence
ccaattgaccgccctatcctgccccgctactgccctaaacacggcacccccctacccttctgagaacattgcgacttctccagcactcgttcgagtactacaccaaccgccacattcatctgcgccgcgcgggtggactaatctgagctgccccgctgcggattagtccaccaccgccctgagcccaacagtcccaacgtgtgccagatggacagtttcgagtatgttcagagcgaatcttccagccctgccggctggtt

SEQ ID NO: 35646 - DNA, 260 bp, Unknown
  Description of Unknown: RightRegion for integrase B9647 sequence
agtacgccacactaccccgacccggaccgcctcgcccgcctggtgcgcgccctcgccggttagcccaccgtcttcggctcgaccaggaacaccgcccccacgaagaccggggtcgtgcccggcccggccacccgccccaggagccccgccggcgccggcccgggcgccgcctcgggcgccccggcgtccggcgccgcgaccgcccgccggaccgcctcgaggcccgcctcggtgcccacgaacgtcgaccccgggcgcgc

SEQ ID NO: 35647 - DNA, 260 bp, Unknown
  Description of Unknown: RightRegion for integrase B9648 sequence
tggaaggatgcgtataaaggcagtttcttctttacatacgaaacctcggtggttatatcttaatagcttggtcgaggtttaaaacaccgaaataatgtctaaaatcgatagtagcgggctacatgcaaaagacgcagcgaaaaccctatacctataatataaggagatagagatatggcagacaccccgatggcgatccgggcgagcgacgagacgaaggcgctgttcgccgacctggccgagcgcggcaatttcgagaa

SEQ ID NO: 35648 - DNA, 260 bp, Unknown
  Description of Unknown: RightRegion for integrase B9649 sequence
cggcgcacagccaacgggcatcaccccgcgagcatcgccagccggtgggagtcggtccaatgaccggccaaccgagcttaacagtacagcggagcccctacgggggctccgtttgcattttgggggaccgctgggcccggctgaactacccgcaagggaagaagcgctggcacgctacgaacggccaccgggccatctgcggatcggtggagttcgaccatccacgggccgagttcagcgcggtgaagccggagcgcggc

SEQ ID NO: 35649 - DNA, 260 bp, Unknown
  Description of Unknown: RightRegion for integrase B9650 sequence
gaggccacaccttactttggacacgaaattggtagtaaccagatctacctatctttgcagtgatttgaggtcgtatggacgctggtttctatggggcgaaagcggagccggggcagctgaaggatcgcaatatgctgctccgcgatgcttgcctccaactgaacgacatccaccaggaagtccaacaatcggactacctcggccataacttcatttcccgcgccttcgaccttctttccaaactcgctgacgatctggag

SEQ ID NO: 35650 - DNA, 260 bp, Unknown
  Description of Unknown: RightRegion for integrase B9651 sequence
agtttcaagaaactccgattagtttgcaaccctacgccgcgcttcgtgcttctggcggcttagcgagcatccgctccagcagctcgcggtcagcctcaaactgcttgcgatcaccgtggccggcttccagttcgtccctgatgtgccgcagcgcgatctgcgccaggatctcgtacacgcgccacggcacctgagcatcggccacgcccaccagtctgcgccgccaccaggtgctccggcgggacacattgggacaaatc

SEQ ID NO: 35651 - DNA, 260 bp, Unknown
  Description of Unknown: RightRegion for integrase B9652 sequence
tacggacgagggagtcatgaaattcccatccagatcaatatatgtttcttttcactgaattagaaaattcaaaatggaagaaatagcctcgcgtcaagaacatatgctataatagaggagatagaatacgtctcgagagatcatgaaagcatggtctcttatttttatatctaaaaaaaaggaggaatgctcatgagtattacaccggagcagcttatcgaaaagtttcaatatgctctcgacaataattggggatacat

SEQ ID NO: 35652 - DNA, 260 bp, Unknown
  Description of Unknown: RightRegion for integrase B9653 sequence
tacggacgagggagtcatgaaattcccatccagatcaatatatgtttcttttcactgaattaaaaaatttaaaatggaagaatagcctcgcgtcaagaacatatgctataatagaggagatgaaatacgtctcgagagatcatgaaagcatggtctcttatttttatatctaaaaaaagggaggaatgctcatgagtattacaccggagcagcttatcgaaaagtttcaatatgctctcgacaataattggggatacatt

SEQ ID NO: 35653 - DNA, 260 bp, Unknown
  Description of Unknown: RightRegion for integrase B9654 sequence
gaccgcccgattttgctgggtcgatggcgagaggatgcaagtcatcaggttaaagtggcctgaaggcctgtcacaaaaccccgcccaccccggcggggtttttcttttgatctggatcaacaactcagaacgccgccagcgcccaatcgcggcttgcactaaaatccattttgctcccgatgacgccatgaaactcccgatccccatcgccctcccggcggagcgctctgcgcttgcgcgcctctacatcgacctgtcga

SEQ ID NO: 35654 - DNA, 260 bp, Unknown
  Description of Unknown: RightRegion for integrase B9655 sequence
cggcaccggatggaattgcccgcgcaggtacttgcgcagctacagcgagttgaagagggataggctgcccgataaggggtcaacaagggcgatcaaggaacggccgcagtctcgatgctgcggcctttatcctgtcattgtagggtgtcttagatacgcggtacttcgtattcctcaccttcaatctcaagcacaaagtggtcttcgaagcgcttcacgaagacaggtgtttggtcaaacatgatgcaagcttcatcctc

SEQ ID NO: 35655 - DNA, 260 bp, Unknown
  Description of Unknown: RightRegion for integrase B9656 sequence
cccataccgcttctctggtctgaccagcgcaagctctatggctttgaagaaaggaaacaataatgaacaataccaatcaatctgcccgccgccgttttgatgccgattttgctgtcagtgccagaattcggcaaatgcgtaatctgcttggacgctcgcaaatggatgttgccgctgccctaggactcacgtttcagcagctccaaaagtatgagaaagcgcaaaaccgaatatctgccggccggctccaccagcttgcc

SEQ ID NO: 35656 - DNA, 260 bp, Unknown
  Description of Unknown: RightRegion for integrase B9657 sequence
gagctggcccggcggtacgggatcagcgaggcgcgcgtccggcagctctgcggctcccggtagccgcctgacgagacggaccccgcaatccggcttgccgcaactggcgcttcgccgcgctgcgtcatacgctccggccgggctcgacgccccagaacgacaaggagtcttccatgcgcaccctgcgcgcggccgccgtggccgctgccctcgcctgcacccccctcgcccacgccgacgagatctcgtacacctacctc

SEQ ID NO: 35657 - DNA, 59 bp, Unknown
  Description of Unknown: RightRegion for integrase B9658 sequence
cgtcttggcattctcaccggcggcggcgacgcccccggtctcaacgctgtgattcgcgc

SEQ ID NO: 35658 - DNA, 260 bp, Unknown
  Description of Unknown: RightRegion for integrase B9659 sequence
ggtgcagaggatgtcgtaccagacatacgccgacgcactcagagcgctgctaagaacgtctgacagcagaacagcccaggattgctaccgggctgtcagggtatcagggagagcgtcctagttgcgttgtcgggctttctgccgggctacatacagttgaagttccagagggttatgcccccaagcgatccgcgcgggtggaatgtggcaacgccgttgtgcgcgaaagcctgcaagctgcgggcacttgccgagtggcg

SEQ ID NO: 35659 - DNA, 260 bp, Unknown
  Description of Unknown: RightRegion for integrase B9660 sequence
gggcgtgtttcctccatcgtgtttagaaatggtcttactcatactttcatataccaaaaatgataccggcatgaatgtcgggaacaaaataacccagaagccgcatagctcctgggtttcattttatcccattattcaattatttttcagatgtgggattccttacttttgtaagaaaacggtgttattctataaacatggcatccccgaacctttaggaatgtagtcgaaatgttacatttgtcagtatatcatatata

SEQ ID NO: 35660 - DNA, 260 bp, Unknown
  Description of Unknown: RightRegion for integrase B9661 sequence
ctgagccggcgggtgcggatcgagtggcaccggcccacggaggagctgggagctgtggcgtaggccactctcagatgaggacccgtactgctcatatgagcggtgcgggtcctttctatgtcacgaaacggtaacggacccctgggccggagtgacgttcggcgggagccgtgacgttcagcgcgcgggagcggggcctccacaccctctctgaccagtcaagatgatggtagtgacgtttgaggtagtgatctgagtac

SEQ ID NO: 35661 - DNA, 260 bp, Unknown
  Description of Unknown: RightRegion for integrase B9662 sequence
aatcgtaaggtagatcctgtgcgaattagggtagtagacataagattgaatatagcagtataaaaaagctaagatctttcgatctcagcttttacttttttatatatatttatatctatcatttgttttttatataaactataaagcatagatagttgtactttcttctttatttctttattatcaattactaattctttttcttctaccattttgcccccctcccagtacattatatgaaagagagattattttagacc

SEQ ID NO: 35662 - DNA, 62 bp, Unknown
  Description of Unknown: RightRegion for integrase B9663 sequence
gacggtctggtgtcaaatatcgtgttcaagaatggattatgtcacacatttattttcagata

SEQ ID NO: 35663 - DNA, 62 bp, Unknown
  Description of Unknown: RightRegion for integrase B9664 sequence
gtgacctcgattcgcttcaaaaacggcatagagcaccaatttttctaccgggacccagaata

SEQ ID NO: 35664 - DNA, 260 bp, Unknown
  Description of Unknown: RightRegion for integrase B9665 sequence
attgggagccgattgtattcgggtcgtgatgtgaaccaatcatctatctacattcctttctaacatttacccaaagacggtttgccaaggaaagtgtaccactccccctttcgagggggagtggatagattttgcgcgttttttgagggtttgccttgcgcgcttactacaacgaactcgacgccgtgaaagccgaggttttgcgcgaagcaatcagggcgggcgcaatcgcgccaggggacgtagatgaacgcagcgtc

SEQ ID NO: 35665 - DNA, 260 bp, Unknown
  Description of Unknown: RightRegion for integrase B9666 sequence
accgtctacgctgtcgacgacatccgcttcaccttcaaaaacggacaggaagtcaaagcctgaccccagaaacgaaaacggctccctgccgctggaggttatctccggtagcagggagcttgatattatgtcctttcttatattttgtagtagcccggattagcattaattacatacttcgcaaattgaatcccagtctcaacccagtcctcaccaatatgactcatgtcatcgttcctttgatgtatctcataatcgtc

SEQ ID NO: 35666 - DNA, 222 bp, Unknown
  Description of Unknown: RightRegion for integrase B9667 sequence
gatttgatgattactaccatagccgccacaagcgacagcttaaatatcacatggaaaatctgacgggtggaacccctcccgtcagatacctaccctgtgtagtcccttgtaaactgtactttttgttgtatcttagccaaaatactttctattacaagtgttactgttataaaggctcctacaagggtatagtagtttaagccatacatcaatggcaaaaga

SEQ ID NO: 35667 - DNA, 260 bp, Unknown
  Description of Unknown: RightRegion for integrase B9668 sequence
accgtctacgctgtcgacgacatccgcttcaccttcaaaaacggacaggaagtcaaagcgtaaaccaattatgtatataaacgcctcactactggttttcataccagcggtgaggcgctttcttattccattcaattttatgccaatatttcatccaataatatatgatattttttgggcagagacgccaccattagtttataccaaatctctctggaatacgttccattctctatacaccaaatcttataatgcaattt

SEQ ID NO: 35668 - DNA, 260 bp, Unknown
  Description of Unknown: RightRegion for integrase B9669 sequence
atcgaaatcacgtgggcgagccctgcggaagacgaggaagataacgagtcggtaacaggctagggagtcgatgtcgaggcctgcggaggggcgggagcgtcgcgcgagccgggcgcagacgtcgagccgcctccgcgtcctccacaggcgcctgtggataactccagagagttaccagtgacgcccaagaggccacgcatagtagctacttaggtcatttctctagccaaagtgtcaaactaactagtgttttcaagtcc

SEQ ID NO: 35669 - DNA, 189 bp, Unknown
  Description of Unknown: RightRegion for integrase B9670 sequence
cgacgctaccgtgagcggcgacgcacgcaagcggtcgtgacgccgaccgagacgagtggttaatggtgttcaggagaatcgtgcgcatcacttcctgctggagcaggcccatctccagcatcacaagattggccacgtccgagggcgagcgcacctgcagccgcgccgcgcccggctccaggaggagcc

SEQ ID NO: 35670 - DNA, 260 bp, Unknown
  Description of Unknown: RightRegion for integrase B9671 sequence
accgtctacgctgccgacgacatccgcttcaccttcaaaaacgggcaggaagtcaaagcctgaccccagaaacgaaaaacggctccctgccgctggaggttatctccggtagcagggagtttcgcttactgttgatggccatcggtatgccgtcagctggttatgcccttggtcaaggctgccgcccacaggataaactcctccacagtcggttctttgccggagaagtgaaacgtcgcccaccgtgcctgaactgctgg

SEQ ID NO: 35671 - DNA, 260 bp, Unknown
  Description of Unknown: RightRegion for integrase B9672 sequence
tcaagaacctcttacacatgtgatcacaatcaacctctcctaagttactttgtcgagggttgacaccctaagtttacacccgcatggaagcgggttgacaaccaatcggtgttttgttattgttgagctatgccactagacggaacttctgagactgttggttatttttcaacgacgaatgtaacttcatcgcccaatacatatcaatgttttggtcataccgattggagagaagatcattggaagtgtgatgaatgtca

SEQ ID NO: 35672 - DNA, 260 bp, Unknown
  Description of Unknown: RightRegion for integrase B9673 sequence
gaagcaaaccccgatcatcgtggtcagatctgcacgttcggccgctatcgcatggccgcgtgatgcgccctatgtcggctagcctcgagctctgaaaacgcaccagcggccacggctgcgcgaatggcgccccgaacaaaaagagcgccgcccgggggagagcgacgcctcagtcgtgagtggggttacgttagtcagaacgccgggaccgggtaagagtcccggtagcaccgcgagcatagcacgccaccaagcaattc

SEQ ID NO: 35673 - DNA, 260 bp, Unknown
  Description of Unknown: RightRegion for integrase B9674 sequence
gaagcaaacccggatctccgcgggaagatctacacccttggccgctaccggatggccgcgtgatgaaccggccgccagccctcgacctgttttgcggggcgggcggcgtcagcatgggattgtatcgggcaggcttcgacgtgaccggcgtcgatttcagaccgcagccgcattatccgttccggttcgtccaggccgacgccctgcgcccgccgttccggctgaccgactttgctttcgtatgggcgtccccgccttgc

SEQ ID NO: 35674 - DNA, 260 bp, Unknown
  Description of Unknown: RightRegion for integrase B9675 sequence
gaatggattatagaacgtgaaatagttaatggatttacacaaaaaaagggtagtcggaaatgactacccttatttgttatgtaattcgtggtggcattcttcgcaaagtgccattaagttagttggattaaatcctaaatctttcatttctaaatctgatgtagctgttgaaattggtgtaacgtgatgtacttcttttgcaggtcttactacaccgcgttctaagcaacgttcgcacagtggatgggcacttatatagg

SEQ ID NO: 35675 - DNA, 260 bp, Unknown
  Description of Unknown: RightRegion for integrase B9676 sequence
tttggcctagcacttaacgccgtttgggatgcaccccccgccagcaaggccaacgccgcctaaatggccgatacatactatggaggccgagcgttatgggggtacgcttggcctctgtttacttcagcccacgccagtgatttgtacgcccgcaagttacgggggtggaagaccaaaacgtggaaagtgcaggcctcagccgccaatcatcgccacagagaaaccgcccaccgcacagaatgcctatgggccaattggta

SEQ ID NO: 35676 - DNA, 260 bp, Unknown
  Description of Unknown: RightRegion for integrase B9677 sequence
gcgcacgccacggctccttccggacgttttccttccaccaatatgcttatcgttttgcattaatcttttaatgtttccaaaattttgttatgtttgcagaaaagatctatatgagaaagtatttcgaaatagactcaaaagagtttcctcccaaacttgtggatctggcttatgaagaggcgagggccgcactcaggaacgacttcgatgccatagccaagacccagcagcaggttcagacttttttgggatggtatctg

SEQ ID NO: 35677 - DNA, 260 bp, Unknown
  Description of Unknown: RightRegion for integrase B9678 sequence
cgaacacttaagctctacagtcgcgcacgtacatatgccatcggcctaccactggcagcgtaactaacgcttttcatcctacctcaacaagatcctgcagacatgcgaaaggggccctcgttcgactagcgagggcccctgtgttgatgactgcgtgattgttctctagcacgtcatggatgccgcaaagacgagcatgctcacgatgccggtcacaagagtgaccagcgactcgtagaggaacgtcatggcgatcaccg

SEQ ID NO: 35678 - DNA, 62 bp, Unknown
  Description of Unknown: RightRegion for integrase B9679 sequence
cgtccggaaacggttgtgttccgcaatgggctgtcccatacattcacttataaggattcttg

SEQ ID NO: 35679 - DNA, 260 bp, Unknown
  Description of Unknown: RightRegion for integrase B9680 sequence
caaaacacaaatataaatactaaccccttgctaattaatttcaaaaagaatccatctaagtagtacatactcaaaaagcactattaatactttttgtatttatagtataaaatgctagtactctttaatataaaacagaagaataattcccctttacaatatattttatatcataaaggggtttaaaattttcggtgaaagattaaattatcttagatttatactgatttaagtcaagatgaattagctgaccattttga

SEQ ID NO: 35680 - DNA, 260 bp, Unknown
  Description of Unknown: RightRegion for integrase B9681 sequence
cgcgagttctgctcgaacgtgtgcaagcacgcggcgtggcgccgcgtgcggacggccgcgtgaagatcacgatgacgaggtacagcgacacgttcacggtcacgcgcgaggaactcgacgcggcacgccgaacctcgccaccgatgcaaggtgtcgcgtacatggtcgccgagcgccggcggttcgagatcggcgaccaactcgagcgcgagatgtttgccgcgatcgagcatgatcgcgcgtatcgacgcgactacccg

SEQ ID NO: 35681 - DNA, 260 bp, Unknown
  Description of Unknown: RightRegion for integrase B9682 sequence
aactaccaaaatacaagtatgaatacaaatgcattaatagtttctctaagcacaaaaaaataaattgattcataagcacatgcactaattcaagaagtttaataccctctgcaatagggacaatataagagggcataattaattatactgttttatcacttaatttaattttaaataccatttgaccattctttttaattgtaaatatcaatatagttttaactttaggatcttttttactattttccatgttgcattcc

SEQ ID NO: 35682 - DNA, 62 bp, Unknown
  Description of Unknown: RightRegion for integrase B9683 sequence
tgggacggaagaattatatcaatacagtttaaaaacggtattgagcatgattttttatatta

SEQ ID NO: 35683 - DNA, 260 bp, Unknown
  Description of Unknown: RightRegion for integrase B9684 sequence
tctggtgtaccagcagtaacacatccgaacacgcaggtcacgatcttccggatcgcggtctgacggatggaagaaaaccggcccccgcggccggttttttgctatgtaaaaaacccgcccgtttccaggcgggaaaggttccccttttttagcgctgatccatcttgtccatcagctttttgatttccatccgcgtcacgtcgtccggcgcgtcttccatcatctctcgcagctggtcgtgcatgtcgcccgtccggctg

SEQ ID NO: 35684 - DNA, 260 bp, Unknown
  Description of Unknown: RightRegion for integrase B9685 sequence
acacaaccacagaatttcataattaatgttactagaaatgttaaattttctattgcatcataatcaaaaaagtgctattattaaatagcacttatcggggtgtggctcagtttggtagagcacttgcttcgggagcaaggggtcgctggttcaagtccagtcactccgaccaataaaaaaatacccctcaacccaaatagggaagaggggtataatcatttttgtgccttgtaacccttatggctgtaaggctaaaattg

SEQ ID NO: 35685 - DNA, 60 bp, Unknown
  Description of Unknown: RightRegion for integrase B9686 sequence
tcgatctccatcccgctcgtggtggaggagttccgccagccgcggaagggcggcggcata

SEQ ID NO: 35686 - DNA, 260 bp, Unknown
  Description of Unknown: RightRegion for integrase B9687 sequence
aaaatcaactatgtggatggatgcgaaaaggaatttaactacacttacgcatttgcaatctaaataatatacaaaagatgaacggaagagcagagatgtaattttttgacatttaaccaaatatctgatagtatgaaaacatactaatgacgacatcggttccaattcccggaacaagatgtctttttgcgtttttagggagtgttttttatgaatcataccgcatatgacgtaatgagagaatatatgatcgagggatc

SEQ ID NO: 35687 - DNA, 260 bp, Unknown
  Description of Unknown: RightRegion for integrase B9688 sequence
gcgcgcgttgcttgtgttgcgtttcaaaacgggcttgaaatacggttcatatataaagcataaaaagaacgggcggcgttactgctgcccgttttgtaatgctttgtcgattgctgcgttgataaattcgtttacgctctgccctgctgccgctgccgcttcttttactaacgctttcttgcctttcttcatggtaagatttacgcggtcgtacttttcgcggttatagtcgttttgataggcgatttgattaaatacgg

SEQ ID NO: 35688 - DNA, 260 bp, Unknown
  Description of Unknown: RightRegion for integrase B9689 sequence
aatgtaaccattcaaatggtcgggagcgtgttcgttctgtactgcgagataccaactcgttaataatggtaagccccggttctttcatgtttttggtgaaagagccggggtatttttgttattttcacccgtttttcggaagaatttgccgaaagtagtagtttcctgccaaaatccagctaagccgatttgaaatcggtagaattttggataaaggagattggcttatgattaggattttactgtcaacgcgtctcggc

SEQ ID NO: 35689 - DNA, 260 bp, Unknown
  Description of Unknown: RightRegion for integrase B9690 sequence
aaagggcgcgttatgtctatcgtcttcaagaacggccttacccacaagttcctgtatgaataaaaggagcggttgagcgtttttaattgcgctctcccgcccctgttatcgggctttcaaaaatctttcaaagaaagaatctgtatctaaatcacaagcatagcatccctcatgcttatggggtgtatgcaaaatcttattttataatatatcatagccctacgcgaatgggaacccttcaaagtcgtctccggctggcg

SEQ ID NO: 35690 - DNA, 166 bp, Unknown
  Description of Unknown: RightRegion for integrase B9691 sequence
gatggccgggtgcaaaccatcgtgttcaagaacggcctctcacacactttcatcctgaaatgacaaaagacccgacggcataatcgccatcgggtctttacttttttctacatacaaatatcgcaaaaagcgcgaattttgtgtcaaactatcagcatagcatcgc

SEQ ID NO: 35691 - DNA, 62 bp, Unknown
  Description of Unknown: RightRegion for integrase B9692 sequence
gacggtctggtgtcaaatatcgtgttcaagaacggattatgtcacacatttattttcagata

SEQ ID NO: 35692 - DNA, 260 bp, Unknown
  Description of Unknown: RightRegion for integrase B9693 sequence
ccgttatcgcaacagcagaaagggcgcatcatcgccttcggccggtggagggctgcagcgtgacaacaaccgagcgccgacctgatgagatggcaagggtttggcatgcggagccaatcgacatcactgcatggagctttttcgaggacgagaatcaatggcgtgatctgctggcggccgggtttgccgtctacatcaacaagaccctgaatgacgttcttgagaaggacccgccacatctttggtttgccgccatgtgg

SEQ ID NO: 35693 - DNA, 260 bp, Unknown
  Description of Unknown: RightRegion for integrase B9694 sequence
actactttcacaggtataaaatcactgatagaagaacaattaatcttcgcccttggttcatgaaacacctgaataatcaggtgttttttagtatataaaaacatacagacaaaaagaacaccttatacaaaggtgttcttcatatgttataatggttgggctggtcgggatcgaaccgacgactcctaccctgtcaaggtagtactctcccgctgagttacagcccatcagtcggaacattgaataatataacatacata

SEQ ID NO: 35694 - DNA, 260 bp, Unknown
  Description of Unknown: RightRegion for integrase B9695 sequence
tacttagaggattatatgtactgtactagaaaactggggctttatgtgcagttagtagcataaattatataggggttatctaaatatatttccctcctgtgattaagttatataaagactaaatcacaggaggtttatttttatgataacagtagaaaaactggaaaaaggtacttattttgatgatgcttttaagatctcatttagatacgatcccactactgtagctaaggtaaaagagcttgcagagcggagatatt

SEQ ID NO: 35695 - DNA, 260 bp, Unknown
  Description of Unknown: RightRegion for integrase B9696 sequence
tacttagaggattatatgtactgtactagaaaactggggctttatgtgcagttagtagcataaattatataggggttatctaaatatatttacctcctgtgattaagttatataaagactaaatcacaggaggtttatttttatgataacagtagaaaaactggaaaaaggtacttattttgatgatgcttttaagatctcatttagatacgatcccactactgtagctaaggtaaaagagctggcagagcggagatatt

SEQ ID NO: 35696 - DNA, 260 bp, Unknown
  Description of Unknown: RightRegion for integrase B9697 sequence
cagatattaagtaatgatgatagcctatcttctgtccatagcagcacaggcagctatcgctgagaagaatgcataattaacataattgttaaggggcaaagctaaatatcctctaaagaggtaaaatagccaaccagccctaaagtgtccaaacgtaaaatttgaccttggagaattgtagaaatacagttcttcagggtcttttttgttacattacacagcggtattcttttgtttaacaaccgtagcaagaattccct

SEQ ID NO: 35697 - DNA, 260 bp, Unknown
  Description of Unknown: RightRegion for integrase B9698 sequence
tacttagaggattatatgtactgtactagaaagctggggctttatgtgcagttagtagcataaattatataggggttatctaaatatatttacctcctgtgattaagttatataaagactaaatcacaggaggtttatttttatgataacagtagaaaaactggaaaaaggtacttattttgatgatgcttttaaaatctcatttagatacgatcccactactgtagctaaggtaaaagagctggcagagcggagatatt

SEQ ID NO: 35698 - DNA, 260 bp, Unknown
  Description of Unknown: RightRegion for integrase B9699 sequence
tacttagaggattatatgtactgtactagaaagctggggctttatgtgcagttagtagcataaattatataggggttatctaaatatatttacctcctgtgattaagttatataaagactaaatcacaggaggtttatttttatgataacagtagaaaaactggaaaaaggtacttattttgatgatgcttttaaaatctcatttagatacgatcccactactgtagctaaggtaaaagagctggcagagcggagatact

SEQ ID NO: 35699 - DNA, 260 bp, Unknown
  Description of Unknown: RightRegion for integrase B9700 sequence
acaacacgagacggcgtcatcgtgctggagtcgcaggcggaggcctcgatggcggcggtctgaggtgcgagattcccgagggatttcgacggattcaacttccggaggggcacggatgagcgagcgacggaacgggtcggacgtgggcggacaactcgacgacatgaccgagcccgagctgcgccggatcatgaccgcggtcgcccgcgccgtcgaggcgcaattgccccggggcgtcggattcgtcgtcctggccgccg

SEQ ID NO: 35700 - DNA, 260 bp, Unknown
  Description of Unknown: RightRegion for integrase B9701 sequence
ggccgcgtcacctccatcacattcaagaacggtgcgacccacacattcacctacaagacatgagaaaagccccggcctcatatactgaggtcggggccatcttgtgcagtctatgcagtatcgccgcaacattatacgtcaaaaaagttgttcaattttataagcatcccctcaaagctaacgatgcgtgatgcttttcggttatccacgcggctttttcaggtttttgcgtcggttaaggcgttttccctgaaaaccct

SEQ ID NO: 35701 - DNA, 260 bp, Unknown
  Description of Unknown: RightRegion for integrase B9702 sequence
tggacggacgaaaagaaagcggaagctcgagtggctgccggaaagaggaatgcacatgcctgaagttacgatgatccccgccagcatcgcccgcacatccgccaaagcgtctaccggtgttcagtgccgtcgggtcgcggcctatgcccgtgtttccaccgatagtgaggagcagcagaccagctacgaagcccaggtggattactacaccaagtacatccagagccgcgaggactggattttcgttggcatctatacgg

SEQ ID NO: 35702 - DNA, 260 bp, Unknown
  Description of Unknown: RightRegion for integrase B9703 sequence
cgcggatatgtggactacctaccttccttagttgagctagctggcgcgctgtctttgggttgaggcatcgcggccttcttctcgggctgactcaggatctcgcggacctcgtccgcgagcaggcgcgctagctcgtccagtaggtcctgccgcgtgggcttgtccgccatgcccaccagtctgcgccgccaccaggtgctccggcgggacaaaccgggacaaacacaaattttgggcgctgagcgattttgcgcgtctca

SEQ ID NO: 35703 - DNA, 260 bp, Unknown
  Description of Unknown: RightRegion for integrase B9704 sequence
aaaacttgcattaagacacaagatatggtatttttcaagtataagtaccttttagcactataagagaaaaaatgggagtggaatcaatgatacatacagcttatgacgtaatgaaagagtttttaatcacggatgcagaccttgaaggtaagtacggaatcccgaaaattcaaaagacttttattcatcccggcaaagatactgtagactttacggagagctttagccggaagattaagaaccaccgggaactggatgta

SEQ ID NO: 35704 - DNA, 260 bp, Unknown
  Description of Unknown: RightRegion for integrase B9705 sequence
aaaacttgcattaagacacaagatatggtatttttcaaatataagtaccttttagcgctataagagaaaaaatgggagtggaatcaatgatacatacagcttatgacgtaatgaaagagtttttaatcacggatgcagaccttgatggtaagtacggaataccgaaaattccaaagacttttatccatccaggcaaagatactgtagactttgcggagagcttcagccgaaagattaagaaccacctggaactggatgta

SEQ ID NO: 35705 - DNA, 260 bp, Unknown
  Description of Unknown: RightRegion for integrase B9706 sequence
ccttccggcaaagctgctgcgaagcaggcaccgaagcgagcccgaaagaccactgcagcctgaccccctataagcgcaaccctggttgcgcaaatgcaccggcatcagttaccctcccccgcaatccgcgcaaccactgtgcggtcaataagggagagggcatcgaatggacaagcggacgtacctccgttggaccggtgaagaatggatggcagtgctggcgattgcgctgccgctgatcgacggtggcacccaaaaga

SEQ ID NO: 35706 - DNA, 260 bp, Unknown
  Description of Unknown: RightRegion for integrase B9707 sequence
ctttgtgggggcacctacataatccgcggtaataaatctatcatggtcgaatggagtaaatgattatgatagatatgctgtttcaagaagttgcaactcacaaaaaaacaatgcccgatcttgcagagtttatgaccacccaggaaaccgctgagaagttggatctaactattagggcggttaatcggctagtgtcaagcaaaaaacttgatgggatccgagtggggaggatgtatctgatttcccgcacgtcgataaag

SEQ ID NO: 35707 - DNA, 260 bp, Unknown
  Description of Unknown: RightRegion for integrase B9708 sequence
gggaagcgtgtggacgctatccggatgaagaacgggatcacccacaaatttatttacaaatgaagacacgaaaaaaggcggggtcgcaagtcccgcctttttcgtgaagaagtatttgattatgattgagaatgaaaagtccattcctgaactgctaaaggggcaggcccgggcctgtccgttcccgggccgttggtgtgtagctatgaagtttaccggtcagaccttagctgtcattgatccgtgccggggtgttcact

SEQ ID NO: 35708 - DNA, 260 bp, Unknown
  Description of Unknown: RightRegion for integrase B9709 sequence
acagccaaaacccccggggaatctgaggggcgcatggtcgtgcccctggccgaagtggcctgaccgccctcccctgcccccgacaagcgaacgcccgggcagcgggcgggcccccgggcgctctcgctcgtcgtcggagggtgaccccgaggcggcgagctggagagggaggctagcacgatcgggctgcctggcctgaccttcgcacgggtacgttttccgcggggcgcacagggcgcgtcgcgggacccatggccgaa

SEQ ID NO: 35709 - DNA, 260 bp, Unknown
  Description of Unknown: RightRegion for integrase B9710 sequence
gggggaatgttggttgcggggacccgcatcagccaatccccccagttcctaatcgtcgcgtaggtatcacccagtgccgtctccagatttggcgtcaaggtcgcgcagccgtgtccattcgcgctcctcaagagcagcacttagcaccacgtccacctcctcgaggtaactcatccacatgggcctcccctggtactttatgttttcaggttggcccgcgttgcggcatagcgctcgcgcggctcgctccctgggggatt

SEQ ID NO: 35710 - DNA, 260 bp, Unknown
  Description of Unknown: RightRegion for integrase B9711 sequence
ggcggaaaaattacgtcattgcaattctcgaatgatgttactattcggtttgtctattcgtaaaacgaaatcccccgagctttgtagctcgggggatcgtgctattttattcatagttatacatagcaaaaaagtgctgttttaatatacatcggatacaaacatcaagtcgggatgttcaaaataggatcatatcgaaaaaaactcatactgcaaataacagcttagaccgcttgattccagtgcttttgcgggctttt

SEQ ID NO: 35711 - DNA, 260 bp, Unknown
  Description of Unknown: RightRegion for integrase B9712 sequence
aatgttactaaactgtccggttcaaagtggcttgggaagtttgatctgcggaaatcggaataacttatttcaaaaatcgtccgaaacaaaaataacaggagacgctttttgtggaacgtctccctgatggattgtttaggctgttgcgaatagaatgcaaccgtctgactcgctgacaaaatcactgacaacgtcatcgttatacatgataatatagtcatagaagctgcccacgaggtcataaacgtccggaacagtga

SEQ ID NO: 35712 - DNA, 260 bp, Unknown
  Description of Unknown: RightRegion for integrase B9713 sequence
gacggcaggatcacagccattacattcaagaatggcataacttacaaatttcactacaaatagaaaaagcccggtctcacaacgagaccgggtcttttacatacttattcgtaaggatatgaatttgaaaaccttgcattttcatacacataccccgatgcgtttttgtcaggatggggcatccttacgttttactccgaacatggcgtttcaaaaagtgcgggatttaccgagttttgcggcaattacgaacatttcat

SEQ ID NO: 35713 - DNA, 260 bp, Unknown
  Description of Unknown: RightRegion for integrase B9714 sequence
aaaacgcctgccctgccgaggcccggtaccttgcggtgccgggccttttcattgcaaaactagctagcgggagaattcgtcggctcaggtaccgtctcgccatattcttctgcaaactcaacagtgccatctttcgacgtgcagacacctgtgacctcgcctttttcgatccggaaaacagctttccactttggataggaaatcattttctcaagaccgcttgcggtgatgctgactttctcgggctgacctaacttgtc

SEQ ID NO: 35714 - DNA, 260 bp, Unknown
  Description of Unknown: RightRegion for integrase B9715 sequence
tcatacccggtcgaaatcgtgttcaagaacggacttcggaaccggttcgtcctgaaggactgatccgtccccttttcctttcccctttgtccctaaaaactacaccataagaaaaagccgctgttttagcggcttttcgtttcccgtgttcagtattcatttgacaccccatggtgaccgtacacgcagacaaggggcgaccgatttcgtccgatttcttttttactatttcccggcattttttaatgaaccaatactga

SEQ ID NO: 35715 - DNA, 254 bp, Unknown
  Description of Unknown: RightRegion for integrase B9716 sequence
ccccgcgtgatgacgcatgaaacacgaaaaccttatatttcattaggtacaacaatatattaagcgcatgaaattttggtgaacacaatatttcacttctgttgtccgttaaaaacgaacaaaatcgcggattgaaaaaaatctatcttctaataattcgcgtatgcgcgcgcgaggccagcccaggcggcccccaggtgaatgaaataaataaaaaaaatatattttttagtcaactcatgcgctcgcagccc

SEQ ID NO: 35716 - DNA, 260 bp, Unknown
  Description of Unknown: RightRegion for integrase B9717 sequence
cgtatcagtccagttgatataccgattacgcttgcttggttaagtggcagcgaggttgtataaggtagggaaattggaatattaatggaaatttcccagttacaggggtctgacctttgtaatatatatgtacttaaggtataagtaataagttatattataagttactttaactataagtacatttttttttttaacttttttattaaagttaaaaaaaatacttataatataagtacttataactataagtatacctt

SEQ ID NO: 35717 - DNA, 260 bp, Unknown
  Description of Unknown: RightRegion for integrase B9718 sequence
ggcaagattatcgagcttgaatttaccaatggccaaatacatagatttgaatactctctatgaacgacaaaagcaccggcagtccttgaccgtcggtgctttctggtatttattcatctttttgatgggaagcttcgagtgctgccagttctctatcccgttcatccttgggttgttgtactgagagatacatagcgtcccctatgtatggttagatatatcatatcaatacagcccagcccggtcattaataacaaaga

SEQ ID NO: 35718 - DNA, 260 bp, Unknown
  Description of Unknown: RightRegion for integrase B9719 sequence
atcgctcgcgctgtaattcaggagtgtacttgggacggagagcggctttttattacgctctaaacctcactattttataatggtggggttccacccgcatgataaaatagtgaaagtaaatttacggaggtgtctttatgaatgtgatctatcgtgtgcatggtgctggtggcttctatatggaaacgcagagccaggaccaggctttccgagctgccaggcaggaagctgcggtatccggccagatggctctggtatcc

SEQ ID NO: 35719 - DNA, 62 bp, Unknown
  Description of Unknown: RightRegion for integrase B9720 sequence
tcaaatgggtctattgaaacaatcacatttaaaaatggattatctcatacatttattcgata

SEQ ID NO: 35720 - DNA, 260 bp, Unknown
  Description of Unknown: RightRegion for integrase B9721 sequence
ggtgcttataaaaccacaggtcgacatgatgcggaaataaagtggagcatcattctaatgtaggcacaagaaataaaagttcttatgacaaacaaaaaaactcatatttaagctaaagggtaggaattctcctaccttttttgcttcatgtaagtgaaaatacagccttgatttcataacgtttcatagccatgactatgcaaccgacagtccaaactaatgggtcaccgtgtgtttccatatattttaaatcttcttca

SEQ ID NO: 35721 - DNA, 260 bp, Unknown
  Description of Unknown: RightRegion for integrase B9722 sequence
ggcctgactcattctgaatcatcactcaaggttatcaggttctgcatctctcgtgcagcataagggtacggaatgagaacggcgactgatgttcttgagcgtcttaggcaggttctggacggcctggaggatgaaatgccggagtgtggtttcatgctggtggggtcgatcccatacgatgaggggtctggtgtggtgttcgtcaccaatctggatgacgactcagtggagtccatagcagaagatatcctctgcgaaga

SEQ ID NO: 35722 - DNA, 260 bp, Unknown
  Description of Unknown: RightRegion for integrase B9723 sequence
gcaacaatgcggcgatataacaaaaaagcactcctaacggggtgttttttgttgcttatatagaacagcttagaacacaggattaatgttgcttgactttgtagctacactatgctacaataatgcaagatacagaaaggataaaacgatgaaaacctacaaagtcttgacctgccaaaaatgcaacgctcgtgtaaccattcgtggttggcgcgaaactcaacccgaacctatcgaatgccccaaatgcggaatcccct

SEQ ID NO: 35723 - DNA, 260 bp, Unknown
  Description of Unknown: RightRegion for integrase B9724 sequence
tccaatcggaactgcacaaccgaatggaggcggtcactcctaaaacataagaaagcgtcttaaaacgcaattggcgcagtttattgaccgttttgaggactctcttaatggtctttttcttgcgattatttaataactgaatactgataaacttcccgtaacaaaatcagcgataggatgtgaccccgaagccaaaactattgacattgtaaatcctgctgttccttgtgtcattggaaagcccaatgacattgtaggag

SEQ ID NO: 35724 - DNA, 260 bp, Unknown
  Description of Unknown: RightRegion for integrase B9725 sequence
ccgttgttggcggtacagcaatataaggtggtgtgcctggggcggtggcggcaagccgcataaaaccgggggtttccttttctgaccatcggtcttagtctgcaccaccttactttcatcaatggggggtggaatgaaacggggaattacgatggcgctggccgtcttgctcgccggatgcgcggcacaaccaaagccggtgttcatccggcttgacggtcaatcaattgcgggcaatccggtgctcgcacaacagtttg

SEQ ID NO: 35725 - DNA, 260 bp, Unknown
  Description of Unknown: RightRegion for integrase B9726 sequence
aacttatctttcaaagagagagaaaaatatagtgcagaacttgaaattgaatatcttgattaaagggtggcaccaatgggtgcccccttttttttattgttaaaatagaaggaattttgtcacaaatgtgtaataagtaagtatgaacatctgtacacttttttattcaagaaaattttataaaattctatgtataatacaagttgatcaggtatatcatatttaacacaaagtaaaatttcctgattatacggaaacaa

SEQ ID NO: 35726 - DNA, 260 bp, Unknown
  Description of Unknown: RightRegion for integrase B9727 sequence
aaggattcgaaggtcgttgaaatcgtgttcaagaacggtcttcggaatagatttgaatattgataaaaagaaaaagccgcgttttctgcggcttttcttcgtctcgtgttagatattcatctgacaccccatagttaccgtacacgcatataaagggcgtcccagttcttccgatttcttttttattatctcccgacatttcttgatgaaataatactgtctttcgggttctctttccggcggcgggaatgataggtcct

SEQ ID NO: 35727 - DNA, 260 bp, Unknown
  Description of Unknown: RightRegion for integrase B9728 sequence
acattagaagaaatgaaggagatttgcagcaggaacggctttgaagtccgatatagggaatgattgcagcagccgttaagggaacttgaacaatatgcctgcctttagaccaaattttactaaaatgggacagaatcattcagaccataataaggataattattattacttttgtcccataattcaaacgattaaactttaaattcagattatgatagagaataccaacttggagttaaagcccgttgaaattcgggaga

SEQ ID NO: 35728 - DNA, 99 bp, Unknown
  Description of Unknown: RightRegion for integrase B9729 sequence
gaaatgatcacaagccccgataacgtgatcattaatctaggaatttggaaaaaagcggcctgatcaacggacggcgacaccgcgctagcacacggtgtc

SEQ ID NO: 35729 - DNA, 260 bp, Unknown
  Description of Unknown: RightRegion for integrase B9730 sequence
aaggattcgaagatccaggaaatcgtcttcaagaacggtcttcgtaataggttcatatattaagccaaaaataaaaagccgctgttttagcggcttttctttgtctcgcgttagatattcatttgacaccccatagttaccgtacacgcatataaagggcgccccagttcttcagactttctttttacgatctcccggcatttcttgataaaataatattgtcgctgcggttcttcttccggcggtggaagtgtcagatc

SEQ ID NO: 35730 - DNA, 260 bp, Unknown
  Description of Unknown: RightRegion for integrase B9731 sequence
aaggattcgaagatccaggaaatcgtcttcaagaacggtcttcgtaatcggttcatatattaagccaaaaataaaaagccgctgttttagcggcttttctttgtctcgcgttagatattcatttgacaccccatagttaccgtacacgcatataaagggcgccccagttcttcagactttctttttacgatctcccgacatttcttgataaaataatattgtcgctgcggttcttcttccggcggcggaagcgtcagatc

SEQ ID NO: 35731 - DNA, 260 bp, Unknown
  Description of Unknown: RightRegion for integrase B9732 sequence
gacggcaccgttgaaacaatccgctttaagagcggtgtttccgtaaggatacatcgccgatgatgcaaaacacccccgggcgcttggctccgggggtgttttgcatagcaaaaggaaaaactattctgggttggtatgcataattatacagtcgtgatgtatagggtatttttattagcatcgggtagctaacttattggaagagcagtatatagtatactccatggcaacagttgttgtcaatcggtttttgacgaatc

SEQ ID NO: 35732 - DNA, 260 bp, Unknown
  Description of Unknown: RightRegion for integrase B9733 sequence
gtgggtgcgggggctcgcactggtcgggttctaactcctgttccctggtcgttcgcggcttgatcgcgttcctgccgccgaacgctgttcggcgctcgacgttcagtgctgttccgcgcgacaatggcgctaccatgaaagggcaggctatggctcccgactacaaaacgaccgaaggctggcgcgtcggtgatctggtctgcgggtcaagcggcgcgagccccggcgaccttcaccggattgttgagatcgaccacgcc

SEQ ID NO: 35733 - DNA, 62 bp, Unknown
  Description of Unknown: RightRegion for integrase B9734 sequence
acacaaacattacttgaatttgccaacaacatgggctataatagtatcgaattgggattgta

SEQ ID NO: 35734 - DNA, 260 bp, Unknown
  Description of Unknown: RightRegion for integrase B9735 sequence
gtaagagaaacggtggcatatatgcagctaccaataaaagtaagcagcaaaattatttcctgaaaactcaagcgttcacctccctcataatttggaggcgacaatcaagagcaaattatatcagaaggggagaggactgtaaaaataagctctccaagtccttaatggcggtttgttggtacaataccaatgaaccgcttttttcatgcaaaaattccggaagccccaaaaggcaaccgtttattatagattgtagaata

SEQ ID NO: 35735 - DNA, 260 bp, Unknown
  Description of Unknown: RightRegion for integrase B9736 sequence
gttggcgtcatagcctggcgatacaggctcacaaaatcggacagacaggatcctgacgaataacagccagcctccgggataaaacccggaggccttttcattcagttttcatcctcaggcggtttttctttgttgtagttcgccgtactgattccaagcagagcgcccaggaacgcgtccaccgccgtgatcgttccgactatctccgccgcgtacgggaaaccccagattttcgccagcgcgaaatacagcgttcccac

SEQ ID NO: 35736 - DNA, 260 bp, Unknown
  Description of Unknown: RightRegion for integrase B9737 sequence
atccatgcgggttccctaatcgctgaaaaaccggaccgcatcttcatcccgctaaacctctgaaaagacgggaaggagaccggctgtgtcaaaaacggaagaggcgacgaagttcgattcattcgtccgcgagttcggtgtggaggaactcgcgcggcggcttggcgtcaacccgtctgcgatctaccactggctccgcggggcaacgtctccccatccgtcgaacgcgatccgtatccaggcgctggcgaagcagcgcg

SEQ ID NO: 35737 - DNA, 260 bp, Unknown
  Description of Unknown: RightRegion for integrase B9738 sequence
gcctctctcgccaagacgcaccagaacgcgtcccaatccggagtgacgccaggcgaggagtagaaggtctcgatcaggcgcccggacttatccccgtcggtgggtccgggcgcttcgtcgtaggtcagctcgtccatcgccctctgccttcgtcgcggtctgcgacgttcccctgggggcggggcgattcgttgtccatcctgcactgcgtcggcgcgtcaaaaaaagcgttctgagctgtgggtttgatgggttgacat

SEQ ID NO: 35738 - DNA, 260 bp, Unknown
  Description of Unknown: RightRegion for integrase B9739 sequence
ggagcgatggagatcacccgggaatgggggcccggttggcgggatcgggcaattggcccttgacaggtgacgcaacatctgttacgctgtaggcagagaagcgaagaacgggccgatcagctgcagtgaacagcggaccggccctgagcctcagcgctgaggaaccagcaccaaggcctgccctattctagcccggactgccgcaggcggcgacctcagcaagaggcgccgccttttcgctatcctggggaggatgccat

SEQ ID NO: 35739 - DNA, 260 bp, Unknown
  Description of Unknown: RightRegion for integrase B9740 sequence
ggtgaaaaggaagtcttcgattcaatcaagcaacttcgcaagatccagaaaaaggccgcttagactttacgcctgcgaccttgaagaccctcctccgggggggggtcttttttgtttaccgcaaatcctgcgaaggttccactcctgccaatgcctcgagccgcaagatctccttctcgaggatgatgatcctctgatgatccttatccgagatggttgagacctgcgacttaatgtcctgccgaatgtcatccaccatt

SEQ ID NO: 35740 - DNA, 260 bp, Unknown
  Description of Unknown: RightRegion for integrase B9741 sequence
cccattgaaattcaacggacttacgtagacggccgcagcgccggcaagcggtggtccgcatgagcgacgctacggactttaccaatctggtcgagcagcatcgtgcgcaggcgttgagtgttgcaaacgcagtccttcaccattccgacctggcgcatgacgtcgtggcggatgcactgttgctggcctggatacacagaactcaattccgcggcgatggaccgttcgtggggtggttcatgcgcattgtaaagaatcgc

SEQ ID NO: 35741 - DNA, 131 bp, Unknown
  Description of Unknown: RightRegion for integrase B9742 sequence
gggagtaaatggtgccggaaagactactcttatgaaggctatagcaggaatattaagaactaattctggtgaaatcctaatcaataaagaaaaagcttatgaaaatgtaaagattaaaaatgaggttatat

SEQ ID NO: 35742 - DNA, 260 bp, Unknown
  Description of Unknown: RightRegion for integrase B9743 sequence
cctgtttttgctatggagttttttggcgcgcgaaaaatgggtcgtacggccccgcacccatagagccaatgtggactcgccacatgccagctcgcgcaaaagcccgccagatgggttccggcgggcgtggtggcgaggaggacaatcacggcgagcaggggcatgggccgctcacgtcgcgatctcgaacatttcctcgaccgcctggtcggcggtgatctcgccccgcttgtgggcctccaggatcggcttgacgtcct

SEQ ID NO: 35743 - DNA, 260 bp, Unknown
  Description of Unknown: RightRegion for integrase B9744 sequence
ggcgtgtcggcacgaaacaaaagcccggcgcgaggggcatcccgcaccgggcctgaggtttgacacgatctgaagggcaaagtcccctcaccctttgcttcaatccagccgctcgacccgcacgaaaccgagcccgccgatgccgagcgcatcggcgccggcgcggccgaggtcgacgcagcggccggctatgaacgggccgagatcagtcgacagcgccacaatggcggcgccggttttcaggttggtaatgcggaagc

SEQ ID NO: 35744 - DNA, 260 bp, Unknown
  Description of Unknown: RightRegion for integrase B9745 sequence
aatattacgaaaagcgaagaatgtcaagaaatcattgacaatcttcttcaacttgttgcatagaaaaatgagcagtacaaaaaatgtcctgctcaaaatatccgaaaaacgaacggatttatcttttccccttccctacgacgcaaacatttcttgttcttctttgcgtcgctgaactaatcctgctactactttcttttgattattaaaaacccaacaacctttgtatttttcttctggtgtttttgcgttcggattct

SEQ ID NO: 35745 - DNA, 260 bp, Unknown
  Description of Unknown: RightRegion for integrase B9746 sequence
cgcgtacccttgcccatcgactgggccacccaacgccagttgctcggattcatccccgcctgattcaccaccgatatcggcagcaagactggctatcggtactgccgccctagcgctctgagaatggcgacgcaaaacgcctgaaaactcaggctaacggtactgctgagaatgcgtaaacgacaaagccccaccagtggcggggctttgttcgaactaggcgccgtttgaccggtacgctagtaatgctggcggagagg

SEQ ID NO: 35746 - DNA, 62 bp, Unknown
  Description of Unknown: RightRegion for integrase B9747 sequence
acagtgtacagcaaagacgatatccgggtgaccttcaaggacgggacggaaatcagagcata

SEQ ID NO: 35747 - DNA, 260 bp, Unknown
  Description of Unknown: RightRegion for integrase B9748 sequence
ctctatagacgcagtattgaattcgaatttacgatcgcaacaaaaaaatcccactctgtgtgagtgggatctgttttaactccgctcataatgctatatttccattcaaaacatattggtcattggtggcccatgtcattggaatggtggtggaaagcgagttgtgtgcaaggtatgttccagatgcattcaaggctttgacgtacacatttcgccctgcgtcgtaaaccaatgcgccgtgataaattgctggggctgat

SEQ ID NO: 35748 - DNA, 60 bp, Unknown
  Description of Unknown: RightRegion for integrase B9749 sequence
cttaacggcgagcagggaggggagtttataaactcgcataaaagactaaaccatattcaa

SEQ ID NO: 35749 - DNA, 260 bp, Unknown
  Description of Unknown: RightRegion for integrase B9750 sequence
ctgcgcatcgggcgggatggacaattgatcttggccgaaagtctggagcagccaacatcatgacccacaccagcgactatctgaaagatatagacaaccgccactgtcaggactgccaggcttggggcgggtggttacctatccaagtgggtgatcagatcagctacacaacccatggccggtgcaagcaccccaaatatgtacctgtcatcgcccgcccggcgcttggttgctgtttgtgggcgccgatgaccatggcc

SEQ ID NO: 35750 - DNA, 260 bp, Unknown
  Description of Unknown: RightRegion for integrase B9751 sequence
gaaaaagaatacacttttaaacagttgcaggaaagtttcaatctggaagaatggaaaatatgaagaaagtctgtattttgctgacttttcttttattttgcagtataactaataatgaatgcaccatgccagaagaaaaactatatcagatagaggaacttccagatttgaaaattaattggactgaaagctacaaatgcctaaatgagccactattagaatatgtgtgggaagtagccaaccacttcctacccagttgc

SEQ ID NO: 35751 - DNA, 61 bp, Unknown
  Description of Unknown: RightRegion for integrase B9752 sequence
agggacagaggttcggatttttcttgtttgcagttggtattgtcgcggaatgaattcaaaa

SEQ ID NO: 35752 - DNA, 260 bp, Unknown
  Description of Unknown: RightRegion for integrase B9753 sequence
gctggtcgggaggcggattttgccgcagaactgagtcgctgcgcagggcttgaaattacctagagggctaggttgcgctagccagccaaggcggcgtatcttttcctacaaaacagaatgcgtaaatgactgatcaagacgctgacagatacccttctccccagtcacggcaacgctttgcgcagacaatcctcatctggcgcaccaaggctggttgggctcacgacaccatggaccgctggggcgaggcagcaggcttt

SEQ ID NO: 35753 - DNA, 260 bp, Unknown
  Description of Unknown: RightRegion for integrase B9754 sequence
acttataaaaaggaacggtttaaagttgtttttcaagttgaaggaatttccgataaaggttgatgtagtaagggttatagagtttgaattaaaaatgtaaaaaataaggataatatattctcgaattaacgagtttatattatccttaaaactgtaactttaaattatcatattagaaactataaataactatttatcttttcattatcacattctaataatccaaataactttaaagtttctgtttctaaatcttttcc

SEQ ID NO: 35754 - DNA, 260 bp, Unknown
  Description of Unknown: RightRegion for integrase B9755 sequence
acagacgaaatgcgagaaactgcccggaagaaagccttagaaaggagcagcgccaatggctaagaatgtaaaggtaatccaggcaacctcgcctattttgtcagcacagtcgcaaatatccgtaaaaaagagaagggtagctgcgtatgcccgtgtttcgaccgaaaaggacgaacagcagaacagctacgaagcccagattgaatactacacccggtacatcaaaagcaatcccgaatggatttttgcaggaatctatt

SEQ ID NO: 35755 - DNA, 260 bp, Unknown
  Description of Unknown: RightRegion for integrase B9756 sequence
aacaagcactaccgaaaaaaagagccgaggaacggagaatccctcggcaccgtcgctgtatgatgtgagacgcggcggctctataatatatctccgccgccgtttttgtcaagatgctttcgcggtctcccgccgtgcttcccgttctctcggctggcggctcggctggcatccgacgccgttctggtgcgatgctcggcgagccagtccgcgtactccctgcggctttcctcggtgttcctgccgccgttcagccatgc

SEQ ID NO: 35756 - DNA, 260 bp, Unknown
  Description of Unknown: RightRegion for integrase B9757 sequence
tccgaaccctacattgtatggggaaagatattcgttcaaacaaaaaggcatcctttaccatgacggtagagggtgtctttcttcattctccggtaaaaccgttttcccgggcgcatttcagcgcacccaaaatcatcttatcctgagccaaagtccgctgcttgatctcgtaaaggggtgtcccccggtgcctgtcccattccatgagctgcttccggtcatggactaccacaccctcatagagatttatcagcttgtcc

SEQ ID NO: 35757 - DNA, 260 bp, Unknown
  Description of Unknown: RightRegion for integrase B9758 sequence
cagcaaactcgaacttgcttttgtatgagagcgggttcgggtttgttttttgtttggacatgattttaaagtagagcaaacaggccgcacaggagagatatcttctgcgcggcttgcttgctctctatggaatttgaatgcattccaaaaactgctcgaaagacatctcccctacctggtatttgaccattgccttctgcgcggtatcacgccatttgttgtagtcctcgcgcattttggcgttcccctgtgcgcgggcg

SEQ ID NO: 35758 - DNA, 62 bp, Unknown
  Description of Unknown: RightRegion for integrase B9759 sequence
ctcaattatttgctaaagaacgataaaaatgtgcttttcagcagcattctgctgccgtcatg

SEQ ID NO: 35759 - DNA, 260 bp, Unknown
  Description of Unknown: RightRegion for integrase B9760 sequence
ggtgttattcggcccggcccctattcggaggacaaggcggtattcgtaccagcttgggactgacgcacggcaatggcggcggctatgtcccagaaacgatcccagcactcagcttcggtgggtcggcgtcctgcgtattccatgttgattacttcgacttgctacgggctgtgcatctaacctacgaacgctgtctacgactttggagaccctcatggcagacatcaaccccctcaccgcccaggtgctgatcaagaagc

SEQ ID NO: 35760 - DNA, 260 bp, Unknown
  Description of Unknown: RightRegion for integrase B9761 sequence
ggtcgccagccggacggtacctacttcgacaaaagccgggtcgtcatccggtggcacgtctaagatcttcctgggctgttaaacgaaccgctctccgcgacatagatcggagggccgttcggccgttcgggtggccggtcgaactgacggtcatgtagcgttcgtggagtcagagccgattcgcttggcgacgttctctgttcggttggttgggctgggtcaagaaggcgcgtttcccccgcgaggggggacgcgccttc

SEQ ID NO: 35761 - DNA, 260 bp, Unknown
  Description of Unknown: RightRegion for integrase B9762 sequence
ggacgcgtggcttcgatagagtttaagaatggactcgttcacgagttcctttacagagaataagagcaggctgaggaggcagcctgctctctttatgtgtgtatgagtaagattagattaacaagaaaggttgattttacaaggttttaggcatcttgtttttagagttcatctgacaccaaaactgccaccaaggcaccatccaacagcaactctgtgtaccatggtgcagactgcatggcatataaatttggataggt

SEQ ID NO: 35762 - DNA, 76 bp, Unknown
  Description of Unknown: RightRegion for integrase B9763 sequence
tttgatagagttggcgtggactttttttattattatactgggatttaccctaaatatgggtaaaaacgccactttc

SEQ ID NO: 35763 - DNA, 260 bp, Unknown
  Description of Unknown: RightRegion for integrase B9764 sequence
ctggtggtagcgggggcgcgctttggccagcgtttgcataggccaataaaactggccgggtagttattccttatatatgtatatcaggcagtcaataaaccaaccgcattggccaacctgcccgccatatattgaccccaaccagcacaaaccaacccaccggcaaggtgtggcaatatattgctgtggccgggggcgtcaataaaaggcgtgtagcctattgtgtttatattggtaacacggcgatcggtgccgataaa

SEQ ID NO: 35764 - DNA, 260 bp, Unknown
  Description of Unknown: RightRegion for integrase B9765 sequence
ccagcgggatttgacacagtcaggaacgctctaggcccgctacaagtgccgctcgcggcgtgatctgagcgagcgtcctacagcgccccacgcgccgcgcccggccgtccaagccgaaggcgcggcgacgggccgtcccgcggcagtcccgcccgtgtcccgggcgtggggcgccgtggtagcctttcccgaagccatgccgatcaacaacgcgtattcgcagtccgtccacgaaagcttgtcgtctgggtacgcgacgc

SEQ ID NO: 35765 - DNA, 260 bp, Unknown
  Description of Unknown: RightRegion for integrase B9766 sequence
cgccctcataccagcggccggttccagccggtgatcatcccgttccgctcggtggccgcgtagaacacaaaaaaaagccccgccacccggcgaaccggacagcggggcatgtagccacgcggtggggggatgtgaagtgatgacttgggccaggcgcatgaccaacgaagaacttcgatcggaggagtacgacttaaaacagcatattgattctggcgagcgcgacggcatcgcagcaagccgatgggcggtcgataggt

SEQ ID NO: 35766 - DNA, 260 bp, Unknown
  Description of Unknown: RightRegion for integrase B9767 sequence
cattaccagcaaactcgaacttggtcttgtatgagagcgggttcgggtttgttttttgtctgaacatgattttaaagtagagcaagcaggccgcacaggagagatatcttctgcgcggtctgtttgctttctatggaatttgaatgcattccgcaaactgctcgaaggacatctcccctacctggtatttgaccattgccttctgcgcggtatcacgccatttgttgtagtcctcgcgcattttggcgttcccctgtgcg

SEQ ID NO: 35767 - DNA, 260 bp, Unknown
  Description of Unknown: RightRegion for integrase B9768 sequence
ggcgtgccggttattctactcgaaaacggaataggtttcctggtttccttaaaggcggcataaggccaacaaaaaaaggccccgatccaagaagctttcgcttcccagatcggggatttgttacggcatccttgcgcatcgtgcggaatagtcgatgtagcctttcggcaatccttcaatcacgtaatattcgccgtcgaattcgaatgcggacattcccgtttgccttgcctgttctatctgttgccgcgtatgcaaca

SEQ ID NO: 35768 - DNA, 260 bp, Unknown
  Description of Unknown: RightRegion for integrase B9769 sequence
tctctacgcaccgctaacctgcctatcgactgggacgaccagatcgccctgttcggaatgtgatggatctcagtctttcacgaccccagcggcgcttcggcgccgctttgcgttcagagccaacaaaggcaaccgatggctgcccactccgtactgcgaaaaatgggcgacggagaaaaagccgccagagcgaccaaatgttgctccagattcgctctccgcagaccgggttgcctccccgaacggcgcggaaccgcgcg

SEQ ID NO: 35769 - DNA, 260 bp, Unknown
  Description of Unknown: RightRegion for integrase B9770 sequence
ccgaacacaattaccgttgtgggaatggttttcatccaaaccagaagacacgccctgccttgattggtagggcgtgtttctttattttttatacatcccctgcaccactccgacgttctccgcccgctcaatatcccgcttgtgcagatactcatagacggccatcatggccgcaggcggctcacccttttgcttgcggtattcctcgatgtgggaaacaacggccttgtgcagggcgttcatgtggttcatttcctccc

SEQ ID NO: 35770 - DNA, 59 bp, Unknown
  Description of Unknown: RightRegion for integrase B9771 sequence
actctttggtgtggacggaaacagtgcgaacctgatggaacaggtaaagcggggaaaag

SEQ ID NO: 35771 - DNA, 260 bp, Unknown
  Description of Unknown: RightRegion for integrase B9772 sequence
tccgaaccctacattgtgtggggaacggtgttcgttcaaaccaaaagacactccttaccttaatcggtagggagtgtcttcttttattcttcgccggaatacccgttcgctctggcgcatttcagcgcacccaagatcatcttgtcctgagccagtgttcgttctttcagctcatagagtggagtacgacgatgatcgtcccattcaatgagttgctttttgtcatgaacgacttgaccctcatagagattgataacctt

SEQ ID NO: 35772 - DNA, 260 bp, Unknown
  Description of Unknown: RightRegion for integrase B9773 sequence
ctcgtaacgttagaaatcaccatcccgatcctccgcaagcaatctgtccgcttaacctcctagcagaatatagtggatgcttcgagtgccgcccatacgattttcaatgtaaatttttccatctgtataagcggaaatattgagtttgccatcagttccggttgtgccagtaagaacacctgtgtaggtcaataagtttgcaccgccagcaagtttagtcattctattaacggttggggaaacacgatatgctagcaagc

SEQ ID NO: 35773 - DNA, 260 bp, Unknown
  Description of Unknown: RightRegion for integrase B9774 sequence
agtaaagacatgcttttcagtatgtctttttattttataccggcgtccccattgaggggatgacacttcaatcacaaagagactgcattatctcaacagtctctattctctaatctccagttctctgctcttttctcacgcatccaaatgatacgtatgatatgaattctggcagggattgccccacgcaatgtgcatctcgcgggcggtcaggtcgatcaccatcgcggtaatggtgctctcgcgatccattgggttaa

SEQ ID NO: 35774 - DNA, 260 bp, Unknown
  Description of Unknown: RightRegion for integrase B9775 sequence
agacacagctttaccgctccttttactgccgtcattcgctcctataaaagaaaacgcccctgatggggcgctttctttaagtatcaaataatcctgcgcgcatactaccaccatccttcaattgtttcaaaatgtaagtctgctttttctccatcatgaaggattagtgctactcctgcaccaccaccataaatttgttctgttccgttgggatctagcgtgacatcatgactgccactgccgcaattgatcactttgta

SEQ ID NO: 35775 - DNA, 260 bp, Unknown
  Description of Unknown: RightRegion for integrase B9776 sequence
tccgaaccctacatcatgtggggaacggtgttcgttcaaaccaaaagacactccttaccttaatcggtagggagtgtcttcttttattcttcgccggaatacccgttcgctctggcgcatttcagcgcacccaaaatcatcttgtcctgagccagtgttcgttctttcagctcatagagtggagtgcggcgatgatcgtcccattcaatgagctgctttttatcatgaacgacttgaccctcatagagattgataacctt

SEQ ID NO: 35776 - DNA, 260 bp, Unknown
  Description of Unknown: RightRegion for integrase B9777 sequence
tacgaagaccggtttaatgtaacttttaaatccggtattagtgtaaatgttaatagaatataattgattgaaatattataataccggctcggggaagtgtttttctctaggccggtattatatttaaaaacaaagctactatttttgtattttattatacgacttttattaataacgttgcgagttctttactctttattgaaaatgaaaaggttatttcgtggaaaagtatgctataagaatagagtaaaagggtatat

SEQ ID NO: 35777 - DNA, 260 bp, Unknown
  Description of Unknown: RightRegion for integrase B9778 sequence
cggaagaaccacgtgagaccggagtccatcaagatggagtggatcgtgccggacacacgatagagtgaccccggccacccctgcgaatcggggaaagttcgaaaccgacgcgagtaggtgcgaaacagggacatctgaatacgaacaacgcgcgaacgccgcccgtctgacgctgtcagatgggcggctttcgtctgtttggcagggcagacatccacgcccttaaataccgccccatgcacccgctgcactactcaccg

SEQ ID NO: 35778 - DNA, 62 bp, Unknown
  Description of Unknown: RightRegion for integrase B9779 sequence
gcgaccaacaaaagtcttctacctcctccactggtctcgtttcagggggtcacgtcagtttg

SEQ ID NO: 35779 - DNA, 260 bp, Unknown
  Description of Unknown: RightRegion for integrase B9780 sequence
ttcgaaccctacatcgtgtggggaacggtgttcgttcaaaccaaaagacactccttaccttaatcggtagggagtgtcttcttttattcttcgccggaatacccgtttgctctggcacatttcagcgcacccaagatcatcttgtcttgagccagagttcgttcttttagctcatagagtggagtgcggcgatgatcgtcccattcaatgagctgctttttgtcatgaacgacttgaccttcatagagattgataacctt

SEQ ID NO: 35780 - DNA, 260 bp, Unknown
  Description of Unknown: RightRegion for integrase B9781 sequence
cacctgctcgttgcgttagaattttcaatccccatcatccgcaagcaaagcaaccggcgctaaaacgccggtttctatcttttacggccaaatctgcccacaattcctattcatcaccgattggcggtttttccgcctcgtcgtccaaaagcatccaatcaaggtcgatcaaaatagagggaggaatcctgtatttgtcttgcggatactttgggtccggggcaaaatcaaaaagtgacagagggatcggttggacattc

SEQ ID NO: 35781 - DNA, 260 bp, Unknown
  Description of Unknown: RightRegion for integrase B9782 sequence
gacgctttcgctaccgctccggggctcccccggggcgggttatacatccccctcgccgcctagaaccatgtcccgcctccgcatcatcgccctcgaagccgagggcaccgacgacgacgtgaacgccgccctccgcggcctcgtggacggcctcaccggccccacccgcgtcacgctcaacagcccttacggctacctccgggcacccggcgggggccgcatcccgaacggcaccgggggcgacgtggagggggcgttcg

SEQ ID NO: 35782 - DNA, 260 bp, Unknown
  Description of Unknown: RightRegion for integrase B9783 sequence
agcagactgtcatttgttttgcgatgcggattgaaattaagggaggcgattgcatggaattaaggacaatactatatggatataacaaatatcagtttgcttattcggtcaacgaggaagaggcaaaaatcgtgaggcggatttttaaggagtatatcaacggtaagacacttcttcaaattgcaaattcacttacccaagaaaaagtcgtctactatagggacagaacgacatggtccaagcaggccgttcgaagagtc

SEQ ID NO: 35783 - DNA, 260 bp, Unknown
  Description of Unknown: RightRegion for integrase B9784 sequence
acacccactatacggttgtatgggcgggtgttcttgctttccttctttttcgaggaacagtaagggccgagacactaacagcttcgcgatatgtcggatgaatggcagatcgcgtagttgttgtgcaataaacacagacaggaaaaggcatctgcccagggaaccgccctgtggtagatgcctttttgtcgtacacggaatcttaatatcgtgtttcgctattatgtagcaaaatcaagcgaagtaatcgtcgcatgtgc

SEQ ID NO: 35784 - DNA, 260 bp, Unknown
  Description of Unknown: RightRegion for integrase B9785 sequence
aaagatatcaaaaatggttttggcaaattcgatggacctgtacctttacccaaggcattttgagccaattttccgaggatttttcgggaaagcggctcttttttgtcctcggcaaagtgtagaattctgactggcgtttttgttggttctgccgaatgcgcactccaagcacagatgccagcgcgttagccggctgtgcggcatttcagacgttaaaaccgcaggcaagccccatcccactccaggacgaaaacacggcg

SEQ ID NO: 35785 - DNA, 61 bp, Unknown
  Description of Unknown: RightRegion for integrase B9786 sequence
gcgaatccgaacacaatcaccgttttcggaatggtttttgtccaaaccagaaaacatgccc

SEQ ID NO: 35786 - DNA, 260 bp, Unknown
  Description of Unknown: RightRegion for integrase B9787 sequence
atagtctcacccgacgattttgaacttgttgtattccctgccctccccaccgaaaaactttaaaatcggtatttttgcaatattatcctgcgatttttgatctttttgttcatttttcgtttgtattttattttttttgttaaaaaaaccgtaaaaactattgcaattcgcaaagcctgtgtgttatactcgccttgttatcgtcactattgagggcatcggtcaacttatagatatcatgcgtgtgcagaagagcttgc

SEQ ID NO: 35787 - DNA, 260 bp, Unknown
  Description of Unknown: RightRegion for integrase B9788 sequence
aaagtcgagtctgtagttttcaaaaactcgcttacattgcatttcatatataaagccccttgacgcgctcaaaggggctttattttaatcctaagccttcgctcggtaaaatattcgtctttcgttactcaggccgtaaaaacgccgtttttcgcgcctcacagcgattttgtcatacattttggaacacgtggcttcccacgaattccaataacgtgtaaattcacggtctattcccgtcgaatttcgtctgcaacctt

SEQ ID NO: 35788 - DNA, 260 bp, Unknown; identical to SEQ ID NO: 35720
  Description of Unknown: RightRegion for integrase B9789 sequence

SEQ ID NO: 35789 - DNA, 260 bp, Unknown
  Description of Unknown: RightRegion for integrase B9790 sequence
gtacacaataccaacctcaccctccgctggtcggccgactccgcgctcgcccgcgtcggctgaccacctccgcctcatcggcccgcggcggcgccagcaacagggcccagagctgccgccacgccacccgccgctccgccagggacgccttcgtcccagcggtcagggcccgtcgaagcgggggctcggggggcgcagtgtcccgccctcgctgctgctcatccataccgaccagcgtaccggccacgagcggaaagaaa

SEQ ID NO: 35790 - DNA, 260 bp, Unknown
  Description of Unknown: RightRegion for integrase B9791 sequence
actaaggtaacttcactttggaaggatgataccactgtccaaacttttactgtggagatttaatttataatggtgtgatattgtataaatttaaatatattacaaaaatttaaatagtaaatgatatgtttattattttagaacctaaatatttaaaatttttaataaatattttatgattaatagtatactttttcaatatatttgatataatgttattagaatgattaaatcaataaaatcaatatattgataaatag

SEQ ID NO: 35791 - DNA, 260 bp, Unknown
  Description of Unknown: RightRegion for integrase B9792 sequence
gaactccaactggacggtaagctgaccgtggtattcctcggcggcattcggataacgatttaaaactatcaaaatgcatactcacaggacggaatcgagagatttcgtcctgttgtcatctatgcacattagtcaattagtattgactaatgtactaatccaagctataataatagctaacgaattatccgatgggaggaacataaaatggctgaacgcgtaacctttagcattgatgcggatatatacgacaaattttg

SEQ ID NO: 35792 - DNA, 260 bp, Unknown
  Description of Unknown: RightRegion for integrase B9793 sequence
ttccagttggttgcgggggcgcgcagccgtctttgcagtgcattgacgaccgttcgcgtctgaacctagcagcggcgcatgccgccacctgatccgtcaacgatcgtttactgcctggcctgccggcgaccggtgaatggcaagggctggttcggtccgggctgtcaatgtggtcgaccggcggcagacgcgctcaaaggcgcgcacagtgccggaacgcgaccgccgaagctctagccgaaatagccctcgatatcgct

SEQ ID NO: 35793 - DNA, 260 bp, Unknown
  Description of Unknown: RightRegion for integrase B9794 sequence
ctaaaaacaggcggcaattggacttcaccgccgattgagttagatgtgaaattgaaggtgtaaatttttttgcgccttcaattccatcatcaatgcgcaggttcattcgcgcataagtgatggatataaaagaaacgccttgatgtatcagctttttcaccactttgaaaagataaaaaagaagggcaggatttattcctgctctttttgtatgccatattccttttccatttcatccatgaaagcatcaaaatctgtca

SEQ ID NO: 35794 - DNA, 260 bp, Unknown
  Description of Unknown: RightRegion for integrase B9795 sequence
aatgaaggcttgcgaattgaacaagcactcagtgctccgactttgagtttcgttgccagttgagaaaagtgtaaacgaaattcaaaatcgagaggaggaattcaactcactttgttgaattcgaaatgtgaaaacgaaagtgcagcctttcatttacaaaggattgggcttcacttcctatatatacaagatatagtgaaccgacttttgaacgtctacaacgggtggtatagggcgaaacttgggataccttggtagcg

SEQ ID NO: 35795 - DNA, 260 bp, Unknown
  Description of Unknown: RightRegion for integrase B9796 sequence
tttttattttgtaggagaaatgcaagaacttttattgtaagagaaacggtggcatatatgtagctgccaataaaagtaagcagcaaaattatttcctgaaaactcaagcgttcacctccctcgtaatttggaggcgacaatcaagagtaaattatatcagaaggggagaggactgtcaaaataagctctccaattcctcaatggcggtttgttggtacaataccgaggtatgaaacgactgcaatatgttttccgcccga

SEQ ID NO: 35796 - DNA, 260 bp, Unknown
  Description of Unknown: RightRegion for integrase B9797 sequence
gtagggttgggtgcgggagcctacaccgggcgctacagtgcgacggttcggctggtggcctgaggtgagtcgccacgtgaaacattccggtttcacggccccgcctatttcaccgtcccgcccggctttagcgccctgatctgcgccagcaatttctccaagggcggccgcgtcccgagacgcgctttgagcggggccagctccactttcagcacgccgcgacgccggcaatagcgacaccggagccgggccaacgtctc

SEQ ID NO: 35797 - DNA, 260 bp, Unknown
  Description of Unknown: RightRegion for integrase B9798 sequence
ctcatctgcttcaaggatgggacagagatcacccaggctatgcaaaggaggatatctgcatgatctatatcactggtgacacccacggcggtttccagcggttcggaagcaaatacttccctcagcaaacgcagatgggccgaaatgactacatgatcatctgtggtgattttggagggttgtgggacggcggccagaaagaccagcattggctggactggctggctgagaaacccttcaccaccttgtttgtggatgga

SEQ ID NO: 35798 - DNA, 260 bp, Unknown
  Description of Unknown: RightRegion for integrase B9799 sequence
ttttacccgccggaaggagatgaagaggtcgttcatagatttgtctacaaagataacccctgatttgcaggggtttttatatcgtgcacactaaggcttacggacaaccgtaagtgctagtatgatacttcatatttatgctcacctcagttatattctatataaataaaacggcctcctggctaaagaaagcggggttagcttccccaggaggccgtgagccgcatactttaattataagccataaggccctccccgtc

SEQ ID NO: 35799 - DNA, 260 bp, Unknown
  Description of Unknown: RightRegion for integrase B9800 sequence
gaccgaccgcaccgtgttcgtgtgcccgctcccgcttcggttcctggcgagggaactggatgaggttgccagcctggcgctcgggcgggcgaaccttgccgcccaccatccaggtggcgaggatctccatcgcgttgttcgacagctcggcgcgggcgtcctcgaattcgtcttccatggcctgccgttcggccttgaggcgccgcgtgtcggcggcccggtcggcggcaaggtctcggtagaggcgggcctgctcgttc

SEQ ID NO: 35800 - DNA, 61 bp, Unknown
  Description of Unknown: RightRegion for integrase B9801 sequence
agaattgttcacaagttttatggtacaatttatgcgaataaagaaaacggaaaattagaat

SEQ ID NO: 35801 - DNA, 260 bp, Unknown
  Description of Unknown: RightRegion for integrase B9802 sequence
accaaaagtcctcgaaatcgtctgatttcgatgacttttgcttttcataagttccgtttttagtgtgccgcttttttctgacccaaacgctgaccccaacgggagctaaactgtacccaagaaaatggacacgagattttgacccatggccccgttcggcggacacgcatttgacccatagggtcagaagcgccgcacctgtgttatgatagaactaccgaacggaggtactgtatgggcacgaagaagaaattcacacc

SEQ ID NO: 35802 - DNA, 260 bp, Unknown
  Description of Unknown: RightRegion for integrase B9803 sequence
gccgccgtggccccgttccactggttccccgggggccggggcttcaagcggccggcggtctgattttgtgttaaggcaaactctggccccataatttgcctaaacgcaaaattgacaggtgcatgacaaatgcttgacagccccccggctttgtgatatactatcaccggcgacgaggcgatatttttttatcgcaatggtggacaattgtccaccggcccgcccgggccgatggacaggggcaagggagcagggagggg

SEQ ID NO: 35803 - DNA, 256 bp, Unknown
  Description of Unknown: RightRegion for integrase B9804 sequence
aaattaataacacaatctgaaaacggatattataaaattatagaattaatgaatgaagactaatattattgtgaataaaaatatggaataaggataatatgattaataataaaagcaagcattgttttaccatgatggtgtacctataaagaattctgtatggagagccaggatgtggtaaaacaatgcttgcaaaagcattaataacaattttgccagatttatctcaggaagagttaattgaaattgcaaagat

SEQ ID NO: 35804 - DNA, 260 bp, Unknown
  Description of Unknown: RightRegion for integrase B9805 sequence
gctgggggcggctacaatcacgcacccccagccgttccggttctgatccggctgggtgcataaggtcccggttgcgacgtttacgattttaaacgaacggccattgaccgggggcaacctcgacagcatgttccggcctgttacggccgctttgggccgctttcggccgctaccggtcgttcagtttgaaaggaggcgacgatggacaattatcatagattgcttcgcagccttcgtgtcgtcgctggattttccctggt

SEQ ID NO: 35805 - DNA, 60 bp, Unknown
  Description of Unknown: RightRegion for integrase B9806 sequence
gctgttaccagcaccgaacagggttcgcctgagcgtcaacaatggcggagaggcagggat

SEQ ID NO: 35806 - DNA, 260 bp, Unknown
  Description of Unknown: RightRegion for integrase B9807 sequence
gtagctgggggcggcaaccgacatacacccagcccaagaatgccggtagatatcgccgcgtagcggcagcgcgcacggcgtgcgcgacactgaatcgaaaatggccgcgagggaagcggttgagggcgccgctacacgcgcctatgttcccgccttgttcaggtcggacctatgccccgcgatcccaacgcccttcacgtctcgatcagtccggagatcgaccacgttccgttcggcgactatgaggggctgctgtggac

SEQ ID NO: 35807 - DNA, 260 bp, Unknown
  Description of Unknown: RightRegion for integrase B9808 sequence
agtcgtaaagtttttggcatatcggtgccacatatactttgcattaagaacattaagcgataagaaaatgagatctccggttgtggggatctcattttctttatgttttagatagacattgttatgaaccgaacacgaagccgagaactgcggctgtttttgctccgacaattccatcaatcgcgaggccgttgtcgttctggaatttcctgaccgcaagttctgtcagcgagccccagataccatcgacttcaagcttg

SEQ ID NO: 35808 - DNA, 260 bp, Unknown
  Description of Unknown: RightRegion for integrase B9809 sequence
gaattttgtcaaaatgttagctacatagatcaggctaaatttgatcagattttagctctttagctgttttaatttttcaataatttgatcagctttttgaactctagttttagagtcgttggtttttattatcattacagcctcaaaaactaaatctgtcagatcatcaatccttttatttaagctctcaatttgctcatcttttaaggcaatcttattgtctcgatctttaatttctgtattcttgtctgctaaaattt

SEQ ID NO: 35809 - DNA, 260 bp, Unknown
  Description of Unknown: RightRegion for integrase B9810 sequence
acttacaccttcgagttctgtgtcaaaatcaaacaaaagagccgctcttcagcggctctttaattacacctgacctcactttaatgcaaatccggatgagcctgccatagtttttcaagcttctgctgatcggtaaccacaacgccgctgaaactgtacgtgcaaacatgatagattttcttgagcgggtcgccgtacagctcctcaaaccgcacaagctgaccgttccttgggtcaatgatgatataggaaccgccctc

SEQ ID NO: 35810 - DNA, 260 bp, Unknown
  Description of Unknown: RightRegion for integrase B9811 sequence
agacacagtctgatcatcacgtacacgatccaaaaccagggcaatccgatcccggttaaataaaaagagaccgcttttgcggtctcttttgttaatccgctcaatgcaattccgggtgggcattccagaggcgggcgagtttttcggcctcggtgggctcaggcatgagggcgggagcggtttgggcgggcggctcgccggtcatgcggacgtgggcaagggatacccattcggggcgcagggagtggatgcgtccccag

SEQ ID NO: 35811 - DNA, 260 bp, Unknown
  Description of Unknown: RightRegion for integrase B9812 sequence
gaccgaaaaactggccgcctactcgatgggctaagaatcggcgaggcagtcacggctgggtgatcagcgcggccggcagcgctaaaccggcccggcctcgatcagatcaacgggcggcggcacgaacatagatttgatgtcgtccgcgctcccgcgcagccagcgctcgacgtcatgctgctcgattgccacagtggagcgcttgtcctgctggccgagcggcagtttcggatccggcttgtgcatccggttcatgatcg

SEQ ID NO: 35812 - DNA, 260 bp, Unknown
  Description of Unknown: RightRegion for integrase B9813 sequence
ttccactggcgctcgggccgggagatggacatgaccgagttcgacatcccgctggacgagtaggaggcccgcataggctgaccgacacgaaaggccccctgcctcggtgactggcagggggcctttgtcgtacccgggtcaggcggtcactcggcgcacccgcgccgggcgcaggtcacttccccggggccggtgtcgacggcctgcatgtccctgccgtgccacgggcggaccggggtcccgcatgccggtaggtgctg

SEQ ID NO: 35813 - DNA, 260 bp, Unknown
  Description of Unknown: RightRegion for integrase B9814 sequence
gtggtagcgggagagcgtcctaacgacaccccccaagtttcaatgttcatggcagtcgcgtgacccgctatccggcaaggagtgcagggcgcttatgggttgcaatccgatgggattgccctctactttctctggataacgcgtctcggttcagggaatggaagatgaagagaacaatcgcgatatttctcggatgtgctgctctagcggcgggaggcccggccctaagcgaggacgtaacggaaagcacggcggcagcg

SEQ ID NO: 35814 - DNA, 260 bp, Unknown
  Description of Unknown: RightRegion for integrase B9815 sequence
tcactgagtagcgggggcctgcaatcggctcatatacccctgatccgcaaggggcaaaaatgacccgcaaaccagccaggcgcccaaaacgccccctagggcgcacgtctacacccgcccgcccccccaaacgctcccaggccttcccacgggctcccagggccaccctccctcacggcgtgctctgttcgcgctgcggctgtacgtttatccaggccgccgccctgcttccccacagctggctcgcaaatctgcactca

SEQ ID NO: 35815 - DNA, 260 bp, Unknown
  Description of Unknown: RightRegion for integrase B9816 sequence
ggggtcagccgtcagaccctggaagcgatttactcagtggatgatgaggtctcactggggtgagccacacagtgggcataccagcggccctcacggtcccgtgacgtggtcatgctcgctgggaatagccaggcccctgagcctccatttcgcgtacgccgtgcgcatcgcgacgacgcgtacgtcgagcccggcgtcgcgccacgcgtcgcgcgcgaaacggatctcggccacctgcgtgagcggcttgtcgtcggcgt

SEQ ID NO: 35816 - DNA, 260 bp, Unknown
  Description of Unknown: RightRegion for integrase B9817 sequence
tcgaaaggaactcagtggtacactcctccttacaaaataaaacttaagcttaagtataattaatttcggggtcttttaggccctcattcatagggtactaattgatacctaaagcgtcatatagctgtttttaggcaaaaagaagaggccctgtcattgcgacggggtttctttacgtgtaaaaagaagagcccatgtatcgggcccgaactaaccttcgaagaacaacactacatcgacaggatcttgaaattcctgtt

SEQ ID NO: 35817 - DNA, 260 bp, Unknown
  Description of Unknown: RightRegion for integrase B9818 sequence
aaattcaacctttaccccgaattaaaaaaggacttgactcgttctggttttttggtattatgatgatacaacctattcgttagatgttacatcataatactaaattacgaagcccacggggcagggaggtaatggggatggcaaagaaagtttacgaagcggtacagttgcccagttgcatcgaaaaggatcgcatggagtggtccggcgacgaatggaacatctggattgaacgcttggataacggcaaagtcaggctg

SEQ ID NO: 35818 - DNA, 260 bp, Unknown
  Description of Unknown: RightRegion for integrase B9819 sequence
ttacaagacaaaaaggtgaaattaacctttaaatcagcatttaggaagatacgccaacgctaaactttatcttaaatttcagttgatacataattttcacaaaatctgaatttcaacccgcacttagtgcgggttttcttttgtaaaaagcaggaaatccgtatatgatgctcactttacttttttgaaaaatgagtaaaaattaaaatgttgaaattcagaaaagttataaggaaattcagatatggaacacaaacaag

SEQ ID NO: 35819 - DNA, 260 bp, Unknown
  Description of Unknown: RightRegion for integrase B9820 sequence
tccaaaggaatgcaatggcatactcctccttataagttaaaaatgaagcttaaatataaataatttaggggtcttttagaccctcattcatagggacctatatgataccgaaagcgttatatcaatgtttgtggagaaaaaaaagaagagaccgtgcggacattacatccacacaatcattccttctttaccgaacatctcaaatttcttagaagctttcttgaagtccaaaatgtctaattttacatctcttggtttac

SEQ ID NO: 35820 - DNA, 260 bp, Unknown
  Description of Unknown: RightRegion for integrase B9821 sequence
ccgaacccggtgtactttttcaagaaagtgttcgccgtggtggtaaacttcacgcggaaatagcgaaaaataaaagcgtcagggcttaggctctggcgcttttgttatgcccggtcgtctctcgatagggctcgagaaatagagcctgctcagctcggcagctatcaccgttcctctctggcctcctcggccgcgtggctattgtttacgggttgcacgggactggctgcggcgcctgctgccttcttgtctcgttttaa

SEQ ID NO: 35821 - DNA, 260 bp, Unknown
  Description of Unknown: RightRegion for integrase B9822 sequence
ctgacaagaggcggccagtggacagacccaccgatagagcttgacgtcaagctcaaaatttagccctttgacttccatcatcgtgcaaccgatgaatcggtacctcaatgatggaaatgattgaaagacataaaaaaagccctgcagattaaggtctgcggggctttttgtgttttatagcgttgtgggcggcgccgcgcttgaggtagtagtcgtgcacggccaggagctcctctttgtgcttgagctcgaggcgctgc

SEQ ID NO: 35822 - DNA, 260 bp, Unknown
  Description of Unknown: RightRegion for integrase B9823 sequence
tcaaaaggtatgcaatactacacaccacagtataagatacaagtaaaactaaagtataattaacataggggtcttttagaccctgattcatagggcactaattgataccaacgtaaaaagaagagggtatgtcgcaatgacacgcccttattcttcgtttttgtttgtttgttttgttcttggttttgtcttatgcttgcatttgttcttttcttgattctcgataactagtttcaagtatggactaattccactcttgg

SEQ ID NO: 35823 - DNA, 260 bp, Unknown
  Description of Unknown: RightRegion for integrase B9824 sequence
gaattaagcaaaggaaagatgtttcacagtgagccatttgaaatatcaataactatacggtaacgatgaagccctagaaatggggctttttctttttagggtacatgtaagccctcattcatgcgggtatagatgataccgaaagtaaaaacaagaagaaaagagaatagcaattgctattctcgctatgtattaattggaggggcaattaccacatgtaacgtcaacgacctcaaacaagtctatgcatctgtctattg

SEQ ID NO: 35824 - DNA, 260 bp, Unknown
  Description of Unknown: RightRegion for integrase B9825 sequence
aatcgtatcgaagctgtggactcggggtttgtcattacctggtacttcgagacaaatccataaacaaaagggacactttgctacaaatggcattgtgtccctttttgtatgccctgatgtcgaaattcgacatcttatgccagttttcgtcgctgtatgactacttcccggatattattacaaacgccagttttttcgccaggaatctggtaatattatccgcaaggagtgaccggcatgtacaggattcggattaaact

SEQ ID NO: 35825 - DNA, 260 bp, Unknown
  Description of Unknown: RightRegion for integrase B9826 sequence
tcactgagtagcgggggcctgcaatcggctcatatacccctgatcagaaaggggcaaaaatgacagccaaacgcaccaggcgcccaaatccccccccagggcgcacgtctacatccacccgcgcccccaaacgctcccaggccctcccaggggctcccaggccaaacacgcggggggccaaacttccccccggtaagctctgccagcgctgcggctgtacgtttatccaggcctcggcaatcctccgcaatctgcattcc

SEQ ID NO: 35826 - DNA, 102 bp, Unknown
  Description of Unknown: RightRegion for integrase B9827 sequence
tttgaagtcggtggtgactggacaaaaccgccaatacaccttgatattaaactgaaagtataagggcaaatttttttgccctaccatatccaacatcaaggc

SEQ ID NO: 35827 - DNA, 260 bp, Unknown
  Description of Unknown: RightRegion for integrase B9828 sequence
gaaatgtcggagtggggcgacgcttggctttcagcgcgccgacgctggcaagagttgcggtaggcccacgcgaccgcatcccagaactcgtccatgcattcctgctccgtcatggggttgacctaacgacatgcgccggatcgtcgtggccttttggctgatcactgcaattgacagagtcttacggtaatccgctagaggtacgatgacacggtaggggcccccgtcctcctgatccacctcatgatccgggggcccct

SEQ ID NO: 35828 - DNA, 260 bp, Unknown
  Description of Unknown: RightRegion for integrase B9829 sequence
ttcgcagtggatagtatgaactggctccccaagtttcccgtcttactaaccgcagtaagatagccgagccggaagtctggttccgcatcgtccacgtaactccagaagataacagcgatttttcgactcaccaggagcagaccgtggagatagcccttggcccaaagggggcgttcgagaacggaaacataggaactatcaagcggcaggtgttacctggcggggtggttaacgcagtgccgcctcggctttcaaaacca

SEQ ID NO: 35829 - DNA, 62 bp, Unknown
  Description of Unknown: RightRegion for integrase B9830 sequence
aacaggttttgggattcatcgacctgctcgtcgacatgcacagatatcgcagaccaacacta

SEQ ID NO: 35830 - DNA, 260 bp, Unknown
  Description of Unknown: RightRegion for integrase B9831 sequence
aacaaattaacaatgaacctaggcaaatcaatagcggctaaattagcaaatattccagcgtaagatacaaacaaaacaaccgagaagttaaagacaagctaaagcgcttgtctttttttttgtgactaatttctcgtacaaatccgagaaaccatatattgctttgtattaaactgttttgcaatttcaacttgctttacaccagaaacaaacagagctttgatcttttgttctattaatggtgaaaacatcctttgatt

SEQ ID NO: 35831 - DNA, 260 bp, Unknown
  Description of Unknown: RightRegion for integrase B9832 sequence
gatgtttcggatgcggggtttgtcattacttggtatttcagtgacaatacagtaaagcaatagttaataagcatgagtattatgtgttttcaacatgatgctcatgctttttttgttggtttctgtctgattcacatatgattttgtcaagtcctgccggattctgtcgagttcgcccataaactggtaattgccggatttttaagcaagaatctggtaaaatttgacaacgaaaggagaacccggtatgtttcagatca

SEQ ID NO: 35832 - DNA, 260 bp, Unknown
  Description of Unknown: RightRegion for integrase B9833 sequence
gtcatctgggatggcgagaatataaccataaatcccgccggagtgcctgcctctttggggtagctcaggcgttgccaaagtgtcacagtagcattatcaaccctaccactttggcaacgccttccacctactccattcaccaccgccgcaccctttctcttcccactgccactgttgccgatcgtgtctcctatgcccacactcgctccggcctttctttcaccgcactggccgtccccatgcagcagaaccgtgaaacc

SEQ ID NO: 35833 - DNA, 137 bp, Unknown
  Description of Unknown: RightRegion for integrase B9834 sequence
ttgagcgaggggatagtagtagagaaaactcagtatgtatctagggagaaatggcgctggtaaatctaccacattgaaaatgctgaccggtatgatgaaaccaactgcaggaaagatttactttgatggaaaacttt

SEQ ID NO: 35834 - DNA, 260 bp, Unknown
  Description of Unknown: RightRegion for integrase B9835 sequence
aaaggcattacgatcttcggaaccgtgttcatgatcatcattgaaacaggccaggacgcttgatagcatcccggcctgttttcttgtgtagctctctttttacttcctgacgatcttgaaggtgacctcgtgcccggggttctccctgatcagcaactccttgacctcatcgactgtcatgttgttatccagcgcggcctgaatcacttccaccagcttcttgccgtccagataggcccagatgtacgtgcgcttgtgcc

SEQ ID NO: 35835 - DNA, 260 bp, Unknown
  Description of Unknown: RightRegion for integrase B9836 sequence
accgtgatctatatgatcggcggcatgttcgtcctggctcttccgcttaaagaaacgcaataaacgagaaaaaggctgcaccttttataggcgcagccttttgtaatatccatacgaaatatgtaattctgttccgatctcgggttttggtgtaccttacacatacaaaatctaaggaaaggagcatggctatgattaggattttcctgtccaggaagttaggcgagcttcgctggacgcaggccgatctgtcccgtgcg

SEQ ID NO: 35836 - DNA, 60 bp, Unknown
  Description of Unknown: RightRegion for integrase B9837 sequence
ggcgggacgatcctcgtccgtccggtcgatccggctttatccctcttgttcggaatttct

SEQ ID NO: 35837 - DNA, 260 bp, Unknown
  Description of Unknown: RightRegion for integrase B9838 sequence
ttgaaaacaggtgcaacttggacaaatccaccatttgaagttgatgtgaaattgaaggtgtaattcttttaccatttatttccatcattaatgagcatatgagttagtacatctatgttggatataattggtaatatatggaaattatatttttttgctgactatctccatcatatgtgtgcttgttcatatgttcatatatgatggagttaagtggcaggcttgatatgacaatgtttaagggcaggtataacctgccc

SEQ ID NO: 35838 - DNA, 260 bp, Unknown
  Description of Unknown: RightRegion for integrase B9839 sequence
tacgaactcaataccgttatctatgtattgcgggatgttttcgtattggtcactgacctataatcagcagaggcatcacgttttattgcgtggtgcctctgctacgttcgccggtcttgacgggatacttataacgtattccgtgataatctaacattttcaccacaaattcccggatttgcggtagattatcactaaaggagcggcataagtatgattaagatttatttgtcaagaaagctcggcgagctgcgcttgac

SEQ ID NO: 35839 - DNA, 61 bp, Unknown
  Description of Unknown: RightRegion for integrase B9840 sequence
ctttcacagccggttccctgcttcccggagctacctccgctccgcctggatctccgctttc

SEQ ID NO: 35840 - DNA, 260 bp, Unknown
  Description of Unknown: RightRegion for integrase B9841 sequence
tatcccggcggcaagctggaaatcatcttcggtggcggttaccttgtcgaagaatccgtctaagcgtaggagattgagggatcatccctctttctctttctttatttcatcgtggatgttcttctgaatcgcatcgagaagggcgaccttttgctctgttgaacattccaaccttgagatgtaattataaatcaactgtgcatggacagttgcaacgcgcttggcaagttcctcctgactttcctttgagcgcagcaaat

SEQ ID NO: 35841 - DNA, 260 bp, Unknown
  Description of Unknown: RightRegion for integrase B9842 sequence
aatcgacacgatgaaatgactgtcacattgcttggaggactgaagttcaaagaactgctgtaggagagataccatgaaaaagacacgctttatcccatacggctacaccatgagagatggccacacggttatccagcatgatgaagctgatattatccgctacatcttccaatcgtacatcaatggtgcgtcgctcaaggagattgccgaggagttgacacgccaaaagataccttatacggagaagacagatgcgtggg

SEQ ID NO: 35842 - DNA, 260 bp, Unknown
  Description of Unknown: RightRegion for integrase B9843 sequence
tttatccatggtatgcttggtctggttgttttccggcaactgaaaacaactgaaaacaactgaaacaactcaaacaactgaagtaaagcccagaagggaagtgcaggccctcctgggctttttacatcattataccttgtccggtttttccagtttcctgaacgtgacctcgtatgctcccatggcagcgagcgcgacaattacggcattcactgcagtaaggacaccgctctgaacagtcagactgccggtaaaaagtg

SEQ ID NO: 35843 - DNA, 260 bp, Unknown
  Description of Unknown: RightRegion for integrase B9844 sequence
gaatatagacataaaatcttcaccttcgagttctgtgtcaaaatcaaacaaaagagccagtgatcactggctctttctgtacatggtcttgatcttcccatccgccctgcgtaccttcaccgtcaccacctcgccctgttttaacattccccgcaggagatactcactgtatttcaacccatgcccggtggcgcgtgaaaaatcctccgcggtaaaatctcccggctgttccaccgccagcttgtgcccctccgccagct

SEQ ID NO: 35844 - DNA, 260 bp, Unknown
  Description of Unknown: RightRegion for integrase B9845 sequence
ggaatcataatctttgggacaacgttcatgatcaccgtacaaattgaaaaccggggcggttaaacaccgtcccggttttcattgtgtcaaaatctgtacttccggtgaatctttccccggttgtcttccagcgtaacacggataaccttctttttccggttctcgccccagcgctttgcgaaatcctccgcttcacgcggttcaagtgtgtctgtgttcgccacattctcccgtgtaccgtcatcataccagacgtacac

SEQ ID NO: 35845 - DNA, 260 bp, Unknown
  Description of Unknown: RightRegion for integrase B9846 sequence
tggtatagcatacaaacagataaaagaaatagcgtagatgtggggattaaaatagccgcataaaacaatttatacaggttttgtctaaaatctcaatgcctctttggttattactaaatattcaaagtaatagctaaggaggttttttttatgattaaacttgagaaactggaaaaaggtgagttttttgaggatgcttttcttgtatcctacaggtacaacaaagattatttaaacaagatgagatcactcaaatacaa

SEQ ID NO: 35846 - DNA, 260 bp, Unknown
  Description of Unknown: RightRegion for integrase B9847 sequence
atcgatcgggtcaccggggcgctgattgacgggctggatgtcagtgccccggaggtgatgtgagatgccgttattcagcggcacacccgacaaatcgagcaccggcagcggtgtagccgatggcttcgccttcatcgaattcggggacgatcttgcgatgcgagaacagacccttccccgtgtgtcccgctgccagatagacgcgggccatgccggccagagtttggaagtacggcacagcggcttcacggatgtaggga

SEQ ID NO: 35847 - DNA, 260 bp, Unknown
  Description of Unknown: RightRegion for integrase B9848 sequence
ggtgcgcacaatgacaatccgattgggttgcagagatacttagactatacgaaaaacggatagcttagcggggcagttcaactacctcgccgcgcgcctcaaggatgaaacaatcatccttgcgctggtagaaaactggcacttcgccaaagtagatacagccctcgtcgctgttccaatgcacggggtcgctgtccgcatgttcctgaaactgctctgctacaaattcccaatttaccatttcatctactcctgtttgc

SEQ ID NO: 35848 - DNA, 260 bp, Unknown
  Description of Unknown: RightRegion for integrase B9849 sequence
atgcacttatccgaacacatcatatttgtaaatggtgttattgggatgatcgtgcagagatgaaaataccctctccggattggagagggtatttttttattttgcgatatgctcataatactccatcagctttcgctccgggccggggccgtccttgtcgagcagaaacgcctttgccagagcagcgtagaactccgggcggttgaggccgaactctacggcgacggggtagtagtccgagtacatcatgttcatggtca

SEQ ID NO: 35849 - DNA, 260 bp, Unknown
  Description of Unknown: RightRegion for integrase B9850 sequence
gaaaagatagtacttaaagaaagcaagagaccaagaatgacactacacggacctataaattagaacacattatataagaaacagggcctgctgaaaaccaaacttcagcaggcccttaaaccaatacaatgaaaatgaattataacattttatttatctgcctttatttctcctgcaatccgtatcagatatacgagcagtataacaaacagactcttaccgaatgaaacgttaatgcttatatcaaggaaccatgtgag

SEQ ID NO: 35850 - DNA, 60 bp, Unknown
  Description of Unknown: RightRegion for integrase B9851 sequence
ccgatattgagtgaagggatagtagtagagaaaactcagtatgtatctagggagaaacgg

SEQ ID NO: 35851 - DNA, 260 bp, Unknown
  Description of Unknown: RightRegion for integrase B9852 sequence
gttctttatccccgaatacctggagccgagggctttgtgcgcggcgtgaatgagcctgaatgagggcttatcaacgataacatcttgggtatgtttcgttatttccaagaagttatcgttgacacgctcccaaagtgacgctaatgagggcactcctcttttctttcttctgaaattgcctcgaaaagcgtccggcacttgattgtgcgctcattctcgaaatgatatgatagtataaatcctgctccggaggttggtat

SEQ ID NO: 35852 - DNA, 260 bp, Unknown
  Description of Unknown: RightRegion for integrase B9853 sequence
atcggagtggtcgcgccgtatgatcgaaagattcaagagcaaaagaaaagagccagggtataacgccctggctcttttgttgctattctttttccggtgttttggtttctctgaccgtctgctcgatcttggtgttgagccagaggtcgaagtttccatactcctcggcgatgatcttctgagtctcctcgtcgatcatgttgcgagcttctgactttgccatctcgaaagccttgctctgtgcttccggcgtaaaggat

SEQ ID NO: 35853 - DNA, 260 bp, Unknown
  Description of Unknown: RightRegion for integrase B9854 sequence
atgcacttatccgaacacatcatatttataaatggtgttattgggatgatcgtgcaaagataaaaaatccctctccggtttggagagggatttttttattttaccacatgctcatagtatttcatgagcttgcgctccgggccggggccgtccttgtcgagcagaaacgcctttgccagggcggcgtagaattccgggcggttgagtccgaattctaccgcgacggggtagtagtccgagtacatcatgttcatggtcac

SEQ ID NO: 35854 - DNA, 260 bp, Unknown
  Description of Unknown: RightRegion for integrase B9855 sequence
atcggagtggtcgcgccgtatgatcgaaagattcaagagcaaaagaaaagagccagggtataacgccctggctcttttgttgctattctttttccggtgtcttggtttctctgaccgtctgctcgattttggtattgagccagagatcgaagttgccgtactcctcggcgatgatcttctgagtctgttcgtcgatcatgttgcgagcttctgactttgccatctcgaaagccttgctctgcgcttccggcgtaaaggat

SEQ ID NO: 35855 - DNA, 260 bp, Unknown
  Description of Unknown: RightRegion for integrase B9856 sequence
atgcacttatccgaacacatcatatttgtaaatggtgttattgggatgatcgtgcaaagataaaaaatccctctccggtttggagagggatttttttattttaccacatgctcatagtatttcatgagcttgcgctccgggccggggccgtctttatcgatcaaaaacgcctttgccagggcggcgtagaattccgggcggttgagtccgaattctaccgcgacggggtagtagtccgagtacatcatgttcatggttac

SEQ ID NO: 35856 - DNA, 260 bp, Unknown
  Description of Unknown: RightRegion for integrase B9857 sequence
atcggagtggtcgcgccgtatgatcgaaagattcaagagcaaaagaaaaaagccagggtataacgccctggctcttttgttgctattctttttccggtgttttggtttctctgaccgtctgctcgatcttggtgttgagccagaggtcgaagttgccatactcctcggcgatgatcttctgagtctcctcgtcgatcatgttgcgagcttcagactttgccatctcgaaagccttgctctgcgcttccggcgtaaaggat

SEQ ID NO: 35857 - DNA, 170 bp, Unknown
  Description of Unknown: RightRegion for integrase B9858 sequence
ccggaaacgggtgccagttgctttagcgacaactcactggtagcgcgaagtggatctccctgaagcagcgcggcttgatgtaagctagaaatcccagcgacgcagtaccccggcagtggttgtacgtgccgggagggtaacacggagccggagggagcgtggatggtcga

SEQ ID NO: 35858 - DNA, 61 bp, Unknown
  Description of Unknown: RightRegion for integrase B9859 sequence
gtaccgatattgagcgaggggatagtagtagaaaaaactcagtatgtatctagggagaaat

SEQ ID NO: 35859 - DNA, 260 bp, Unknown
  Description of Unknown: RightRegion for integrase B9860 sequence
gaatcatccggcggccgttggactaacccgccgatcgaacttgatatcaaattgcgcctataatttttttgaccttttgacttccatcattggggaacggatgaacttgcgccccaatgatggaaataatagaagaatgcttatataacaacgtttccggggcatctaaaacaatggccgcaacgtgatatatataatatgccacaaatccaccttccctttttcggcgatattgccaatggtatttttgcgccgatggt

SEQ ID NO: 35860 - DNA, 62 bp, Unknown
  Description of Unknown: RightRegion for integrase B9861 sequence
atagtttgggacggcaagaatatcaatatttttattaaaggtatttcagaattatcagaata

SEQ ID NO: 35861 - DNA, 260 bp, Unknown
  Description of Unknown: RightRegion for integrase B9862 sequence
catccgatggggacagaaatcctgtctgcgtcagaaaggctacaagcgctggccgcgggataacccaacgcccgccaattttatatccgttcagccgcagggtttttaccctgcggtttttttgtcggtactgaactccacgtttgcaccagttcacgacagtgtctgaatcaacctgcatgatctttgccactaccttgggcgtcatgtcgagaaccattggtacctcctgtttcaaaaccgaaaactccgaaatcatc

SEQ ID NO: 35862 - DNA, 260 bp, Unknown
  Description of Unknown: RightRegion for integrase B9863 sequence
caaaccccggtcctatacgccgtccccggcggcttcgtgcttgcgctcaggctggcggcgtgagggcacgcaaaaaggccccgcccggtatagcaggtgctatatcaggcggggctttctcagccttcggcgtcctccggatcggcgggcggttcgtcttctttggcgaacaggtaagcggggttcgctgcgccggcggcgtcggccagaccctcgccgatgatgtaggcgatgacgctggcggccgacatgatcacgcc

SEQ ID NO: 35863 - DNA, 260 bp, Unknown
  Description of Unknown: RightRegion for integrase B9864 sequence
atagtttgggacggcaagaatatcaatatttttattaaaggtatttcagaattatcagaataagccaattgaaatacctaagaaaatcatttccgccatgtgtcaacagcagttgcagttgaagaatcgtggaaacgataatcacaggcttgttacccacatcgcaaaagcaaggataaataatggtttatctataactgaaatatgtaaactaacaggattgagttatgataattacatcaagtatgaacgtgacgaag

SEQ ID NO: 35864 - DNA, 260 bp, Unknown
  Description of Unknown: RightRegion for integrase B9865 sequence
agcagaaaatacagtaacggtcaacctggaaacaaggtcggctggaataagaaggaggcataagatggcaacagcaacaaggcgcgtcgtgcgcgagataccgagagcaatgctgctcaatataaacgcagaagaaatcatagaaaaaacacccgtggcagcatacgcccgcgtatcgacggagcgcgaagaacaggaagactccttcgaaagacaggtggcacattacacggcactgatacaatccaagagcgaatgga

SEQ ID NO: 35865 - DNA, 260 bp, Unknown
  Description of Unknown: RightRegion for integrase B9866 sequence
gatggcttagttaagccaatgcatttttatattgaaattccgaaaagaatgccaataacataaatcaaaaaaccctctaaaaaaaatagagagtttttttttgccttaagggtgttatcgcaacagcctaataggcttgtaaccaataaataaataataaattaataattaaaactaattatgaaaacaaaatttattctacgcttaaaatgaaaattaaacagcaaacctccaaaacaaacccttgtatctgttgtttc

SEQ ID NO: 35866 - DNA, 260 bp, Unknown
  Description of Unknown: RightRegion for integrase B9867 sequence
ctactgggaacactatcagttaaattcagattaccttcaacatttcataaaaaagctgcttaaacaattacttatactagtttaatggatgtgcatttaataacctaagaccataacgccccttattatgtctgtatttttttaacaaaatacagcatatgggaaagcctcgtttattaccgttaattgaagtttattttaagtgccactcttgtgggcatgattttaaggctgtgcctggtgaaacagttgaggcccct

SEQ ID NO: 35867 - DNA, 260 bp, Unknown
  Description of Unknown: RightRegion for integrase B9868 sequence
agatggctgagggtagagaagaaaaccggtagctgggcggccgctatcgaccgccctctgtgatcgttaagctgatttcttgccgtcttggtgcatgcctggaggggtagtgtgcaccaccaggtgcccttgtccctcccagaaattctcttgcacctccacacacacccgccatgcggcccatgcgacctcttcgccggccgcgagaacattgccctgatcatcaatgattgccatgcgggctctggttcccgatttgg

SEQ ID NO: 35868 - DNA, 260 bp, Unknown; identical to SEQ ID NO: 35706
  Description of Unknown: RightRegion for integrase B9869 sequence

SEQ ID NO: 35869 - DNA, 260 bp, Unknown
  Description of Unknown: RightRegion for integrase B9870 sequence
gagagcacctgggagttccaggcattctctagaggtgatggtcttagggttaaatggcactaatacgcataaggtctattagtctgtgaaaatttcgtgcggcgaatttattagccttttgctcagattcatcttgctgtttgtctagtccgattccgcgagataggttgtcgtgcttgaggtgatagagttcgtgagccaatgtttctgctgtgcattctggagacagtgactcgctaataaagatgtgtggtacgttt

SEQ ID NO: 35870 - DNA, 260 bp, Unknown
  Description of Unknown: RightRegion for integrase B9871 sequence
ggtcgcgtctcccggctggtattcaagaacggtctgacccattccttcctctggcgggcctgacctttttcgtggcgtcacgaaaatggtacgaaaaaagcggagtagccgttatgactactccgctttcgcgttcctctgtgggtcagatattcggttgtttacgtttgcaagaaaacggtgtcaatagatgaacatagcatccccaacctttaacggttgtgaccgaaatcttccttttgtaaacaacgccatcttac

SEQ ID NO: 35871 - DNA, 260 bp, Unknown
  Description of Unknown: RightRegion for integrase B9872 sequence
acggcgtgcagtaaccgcgtttccaattgggcgggctttgaggtaatctaccagaggaaataacgacactgacgcagaacaggtaggcgggaggatgagcaatggaggagcggcatcaggcagcgctggacatgctggtcagtgctctgtcagaaggagtaaaccccgaagaactccgtgcggccgtggaacagctgatcgcggcccggcaaccgaaggtcaagccaaaagcagagcccatacgcgcgtgggctcacggg

SEQ ID NO: 35872 - DNA, 260 bp, Unknown
  Description of Unknown: RightRegion for integrase B9873 sequence
gaatcaaccggcggtcgatggtctgcgccaaatattgaattgaatatttctttgcgcctatgatttccatcatcggggcgcaaattcatcggtacaccaatgatggaaataattaaaaacgccgttaaataagcatttcaaaagggaagggcaagtgcctttccttttttatttatatatcatattcctaatattttcaaatagtgttattatactatcaaaaaatggaggtttgaagcatggtttttttcgaaaaattt

SEQ ID NO: 35873 - DNA, 260 bp, Unknown
  Description of Unknown: RightRegion for integrase B9874 sequence
aatggcccagcaggtaatcaaaaaggatggatgcagaagaaggaggcagcagcatgtcagtaactacaagaagagtagtacgagaaataccacgcgcagcaattatccagatggagctgccgcagattgaacgtgatgtggtcgccgcatacgccagagtatcaacagaaaaggaagagcaggaagatagcttcgaaaggcaggtcagccactacacagccctaataacatccaagccggaatggaagttcggtggtatc

SEQ ID NO: 35874 - DNA, 260 bp, Unknown
  Description of Unknown: RightRegion for integrase B9875 sequence
acacccattaatctagtacaaatctttcctcgtaaaaccaatgttcatggtaaaaatatttaactaggattatatcataataaaataaaccttgcagaactatttttatctgcaaggtttattattacttaattaaagaatcttcaattactctctttgcttcgtctaagatgtttttgtaatgaccacgagatgagacccactcatcatttacatataaatcatatacattatcacctcttagtttaattgtaatatca

SEQ ID NO: 35875 - DNA, 260 bp, Unknown
  Description of Unknown: RightRegion for integrase B9876 sequence
ctattgttctataaaggtgactttatgctgatagttccgttcgatgagaaggttttagactaaacaataagagaggtgttttcacacacctctcttttttgatgctcccttttccgtaatattcttacgggcatgtggaataatcttccgttttcgctcaaattgtcatgacaagcgtaaaatatgcggaaaggagcaaagcaatgattagaatcctattgtccactcgtctcggcgaaaggcgttggacacaatcagat

SEQ ID NO: 35876 - DNA, 260 bp, Unknown
  Description of Unknown: RightRegion for integrase B9877 sequence
gagtgtaccgggggttcgtcatatccgggcggaggattagttcccggatttggtaagttataaaaatgagccgtctttcatgcattcgcgataaacgcgctcgatattctcgatagccagcgcagctttgccgtttcggaagttgggatttctccggcaaaaattttcatatgcgttaatgtcttcgagcacgtcgtcgaaaaattcgcgggaatgtttcacatggttataaatctcgtcattcgtgcgcaatatccgcc

SEQ ID NO: 35877 - DNA, 260 bp, Unknown
  Description of Unknown: RightRegion for integrase B9878 sequence
ctgcgaaccacttgcacgctggcgatcgcgctgccactggagatgctgaagcgcgcagcttgagcccgggtgcggggctgcaaatgcgcgccccgaatcgtgagagtgcctgcaggcgagatcctgcatggccactccaaccaacatcaccgcttccatcgccagcggcgcttcgctgctggttggcgttgctccgccgcctccccctccgccccctccgccgccgccgccgcccccgcccagcttgacgctgagcgtcg

SEQ ID NO: 35878 - DNA, 260 bp, Unknown
  Description of Unknown: RightRegion for integrase B9879 sequence
ttgctgggaaccaaagttataaaacttgatttacctgaaaaactacagaaaaaagctgcttaatcaataagttaaatttcttctatatgttggtatttgatgcagtatctgcaaaccgtggcttaatattttattgattctgcacagaatttacagtttttcatttattgttttggttgcgtattttctttggtatcagattgaatcttttgttgcaaaggctgaagccaaaaaacagcaacaacgacgactataatgcc

SEQ ID NO: 35879 - DNA, 260 bp, Unknown
  Description of Unknown: RightRegion for integrase B9880 sequence
tatctaggcggtggtagcgggggtccgctttcgactccagctatcagggttcgaattatctgatttaccgcagaagaattcaatcgttggttgacttcccccgcccgtctggctctcgccttcggctcgcccgtccccttcggggaccggccgccagtcgggcgggagaagggccgcgacctaacggtcgcggccccgctttcaaaccaacaacaccccgacaataaaccccaatacgaaaccgatcagcagcccggtgc

SEQ ID NO: 35880 - DNA, 260 bp, Unknown
  Description of Unknown: RightRegion for integrase B9881 sequence
cccggaggaatcgtgatattcgggtcaacgttcatgatcatcatagaaaaccgggccggttagcaccgagcccggtttttcttttcctcttgcagaatccgaatctgattttcaagatcctgtatctgtttgtcaatacgtttttcttcataatccccgtaaagcagaactttcaaatcctcatccaccgcatccgctatcagcagggccttttgaaaagacaaccctgtcacacgttcgcccttacgcaagcgggaaag

SEQ ID NO: 35881 - DNA, 260 bp, Unknown
  Description of Unknown: RightRegion for integrase B9882 sequence
tccgatggtcacgttaccgtgatggagttccgtagcggactcacgatagagttcaagtattaggaggaagaaatgccacagaccgaagcgcagaagcgtgcgtatgcgaaataccacaagaagaacatccaccgtgtgtcccttgacttgcagaaatcctactacgaaatcgtcaaggagcacgcagacaaggcaggcgaatccgtgagcatgtacattaagcgggctctcgaggctcgaatgtcagcagaggattgaaa

SEQ ID NO: 35882 - DNA, 260 bp, Unknown
  Description of Unknown: RightRegion for integrase B9883 sequence
tctgggtatggttgcgggggcaggatttcgcacccagaaccacgccggatccgcatccgctagccactcgcagcaccggccacgccaccctggcgtggccaccccctccccaagcacgcaacgccgacgatccgcgccggacgatcaacacgcgcgcctgcaggtgcgcccgcgcgaagtggaaaagctaaaaaccgtggggccatcggaaaaaggtaacaaaggtaatgtttgccatcgacacagcggaaagctagaca

SEQ ID NO: 35883 - DNA, 260 bp, Unknown
  Description of Unknown: RightRegion for integrase B9884 sequence
gagttcaccggtcattggtttgtcattacttggtatttcggagacaacagcgtaaagcgatagtaaatacgcaggagtgccgcggctgcgctcctgccttttttgtctttttctgtcgcgccccgccacaatatcacagcattcggcagcatctgaccaattatccagtattcttacaaatgccagacttttcgtgtgattgctggtagaatattccatgaaaggagcaatgggcatgtaccgaatcgttgtgaagctgg

SEQ ID NO: 35884 - DNA, 260 bp, Unknown
  Description of Unknown: RightRegion for integrase B9885 sequence
ctatccctaaaagcgcacagggataagatcagccccgcaatatcaggcagaggggggaattgatatgacagcaagtgacaagctattaaacaatatgctcaaggcaattgagcaatacaacaaggaaaacaaggacaaaatcacaccattgcaggcactcaagatatactgccggatgatcaaataaaagaaagagcaggggatcaatcccctgctccttttttggcctcaagctcacgcttgatcagattttcaatgta

SEQ ID NO: 35885 - DNA, 260 bp, Unknown
  Description of Unknown: RightRegion for integrase B9886 sequence
gcatacgaactcgtattttatgcgaacgtctttgcgctgatcgtaaaaatgccggaacggtgaaaaccgtcccggcattttcctttttcagatttcctgttcagacagccattccgcaaactcctcaagggtgagaaggtttacaccgatccagcctgcggaatatttttcttcggaaaagtcgaagtaataattttctacagttttaggctgcacgttcagcttacctcgatgctgtagatagtccatgatcttctcca

SEQ ID NO: 35886 - DNA, 260 bp, Unknown
  Description of Unknown: RightRegion for integrase B9887 sequence
gaaccgaaccacgcctttgtcttccttcgcggccagctcggccttgtcatcttccgggaataaacggtttgttgcttctcttttcagatcacttcaagcatgatccgtctttctttttttccatcgaaccatttcaggcatggtttgtccccgaaattcgtcagcacttcgctgagcagatatgtatttccctcgatgtctaccagtttctcccccatggcgttttcgctgatctctacctcatccgggatatacactct

SEQ ID NO: 35887 - DNA, 159 bp, Unknown
  Description of Unknown: RightRegion for integrase B9888 sequence
ccagccccggaacggatgactgcttgcggcgcgttcccttcacccgctccacgttttcgctgaagtcccgaacgtcgccgttccgcggccgccgttctacataggctccgcgagttgcgtacggttcctgccgccggacttcgctgcgtagagcatcgt

SEQ ID NO: 35888 - DNA, 62 bp, Unknown
  Description of Unknown: RightRegion for integrase B9889 sequence
agcaaaccaaagtatctaaagtctcaagatgactttgatcttggaattgaatggaaaaccta

SEQ ID NO: 35889 - DNA, 239 bp, Unknown
  Description of Unknown: RightRegion for integrase B9890 sequence
tcaaagctcgaaccaagatatatattcattggtggtatgtttggttgtatattctcgcgttaaacgtgaagataaaggattgtctgatttcatatctatttcccgcggccgattaaaggccgcttttttatcttctaacttatgcaacatgcacaatatcatcaaaaagtatatttcaaggtgaatgaaatgactaaaatttttgtattttttagctaaaaaccgggctcgccgcaacc

SEQ ID NO: 35890 - DNA, 260 bp, Unknown
  Description of Unknown: RightRegion for integrase B9891 sequence
gataatattcatatagaatggaaagaatttataaaatttcttatatctaataaaaataaataaccagatattaatctggttattttaaattactcatctataatagttactttattcattttatcaccttgattaattttatctacaaattccataccatcaataactttaccaaaaactgtatgaatgccatctaaatgaggaaaagaatcatagcaaataaaaaattgactactaccagtatcttttcctgcgtgtgc

SEQ ID NO: 35891 - DNA, 260 bp, Unknown
  Description of Unknown: RightRegion for integrase B9892 sequence
atcggggtggtggcgccgtatgaaaagaaaattcaaaggcaaagaaaaagagccaagacttaatgtcctggctctttccgtttgtaccggtgcaattttaacgaataagtcgtgccatggtttctgctacatgggtcatgacgatatcgatcctgtctttgatgccgttcagttcagcttccgccttctgaagagcgagagcgatatcaggatcatcttccgtggcattcatgggctcataattctgatcaggcatattc

SEQ ID NO: 35892 - DNA, 260 bp, Unknown
  Description of Unknown: RightRegion for integrase B9893 sequence
gaaaaattgcatataaaatggaaagtgtttatagaattattaatatcaaacaaaaataaataaccagatattaatctggttatttaaaattattcctctataataaatactctattcattttatcaccctgattaatcttgtctacaaaatccataccatcaattacttgaccaaaaacagtatgaattccatctaaatgaggaaaagaatcataacaaataaaaaattgactactaccagtatcttttcctgcatgtgc

SEQ ID NO: 35893 - DNA, 260 bp, Unknown
  Description of Unknown: RightRegion for integrase B9894 sequence
tacgaactcttttggtttcaaaacgtgttctgcctgacaatagaaataccgtggaagcgttaagcctccacggtatttttatttgccggtaacttgcagaaatgcgtatctcctactctggaccacccttctatttgacttaaaattgaaatgagcttcacttttcagaccgataaagtgaaactcatttcattttttaacttgcgggtcatttgccggtgtagcttattcccacacttccttcttgtgaaggcaccctt

SEQ ID NO: 35894 - DNA, 260 bp, Unknown
  Description of Unknown: RightRegion for integrase B9895 sequence
agaatgctgcggattgaccgcaagaccggggcgtggatggcgcaggagtacggagcggggtaatcagtcttttttcattatgccgtatcggtcggcggatgggataggtcctgcggtcggcactcgtagtgcttctgccgtcttcgatccgcccgcttgtccttcctccgcagctgatcgagaaccaacaaggcggcaaaaccggccatttgcactagggcggaccagcttggctcatggccggagagcaggtgatacag

SEQ ID NO: 35895 - DNA, 260 bp, Unknown
  Description of Unknown: RightRegion for integrase B9896 sequence
gccacgatcatcgtgacgccggccgtgttcgtgctgacggtgccgctgccggcctgcgtataacggccggaaaacaaaaaaggcccgctcgggatctctcccgggcgggtctctttgtgtgcggctcgttttgggcctttttaggcggtgttcttcttcggcgggtatttcctcgccctttgagcttttcgcgctcctgcgggcgcctgagggccctctgcggccgttttaatcgctcccggccggtttcccttccggca

SEQ ID NO: 35896 - DNA, 260 bp, Unknown
  Description of Unknown: RightRegion for integrase B9897 sequence
gaacccgaatttgtatttgtgcatggcgtctttgggtgcattttcccatggggcgagggatgaaatcgcccaaaccatcaatttcattttcagaaccggcggcagggaaagccaaacccagccgccggtttttcacgtttctaattatccgcgcgcgcacgcgcgaggggccgtttggggccgtccaggtgaatgaaattcataaaaaaattaaaaaaattagcgaaatggtgggctcccagcgcccgcgagagaggaaa

SEQ ID NO: 35897 - DNA, 260 bp, Unknown
  Description of Unknown: RightRegion for integrase B9898 sequence
actataccttttgtcttttcaaggttggatatgtacgactatttcaagatgtatcaagcataataaaaagccactttatttagtggctttatctttttaataatgcgatttctttatcgtgcttgtttagcatatcttcatgcttttcgagtatgcagtcatggtcttttgatgtttctactatctgtttcattgtttctcgtaattgagtaattgattcagacaatgcccatgcgcctttaccaaagtatccgataact

SEQ ID NO: 35898 - DNA, 260 bp, Unknown
  Description of Unknown: RightRegion for integrase B9899 sequence
gaacccgaatttgtatttgtgcatggcgtctttgggtgcattttcccatggggcgagggatgaaatcgcccaaaccatcaatttcattttcagaaccggcggcagggaaagccaaacccagtcgccggttttttcacgtttccaattatccgcgcgcgcacgcgcgagggggccgtttggggccgtccaggtgaatgaaattcataaaaaaattaaaaaaattagcgaaatggtgggctcccagcgcccgcgagagagga

SEQ ID NO: 35899 - DNA, 260 bp, Unknown
  Description of Unknown: RightRegion for integrase B9900 sequence
gatccaagaaactgcattgatgtttcggatgcggggtttgtcattacctggtatttccattaatattttgtttcaaaacagttgctgacgagggattcacgcttcaatgggcgtgtttccctcgctttttttgtctgaatcttatagcccaaaatcagaatatgttcaattgcgtcagaatctgtcgagttctcccataaactggtaattaccagatttccgagcaggaatctggtaaaatttgccattgaaaggagacg

SEQ ID NO: 35900 - DNA, 260 bp, Unknown
  Description of Unknown: RightRegion for integrase B9901 sequence
agtgaagatggtacgatgcttcaaggtgcctacacgcttgggccgacggctgaagcctcctgagaaaccctgtgacagcggagataggaaaagggtgcagcgttgcaccccttgtccagcttggccctcagtgacgctctatggcttagcagcgaggcagcttgtgctggtcgctaccgacgtggatttcgaagtagtgccgcttgcgctccacatagtagcgaacgccctcatacgtaactgaaaaggcgtcttcctcg

SEQ ID NO: 35901 - DNA, 173 bp, Unknown
  Description of Unknown: RightRegion for integrase B9902 sequence
tcccacttcgtgccgtggccggacaaaagcggcctggatgtctaccccgcgctgacagtctaattgcaattctgacaggctaattgcaatcctgttcgccgaaatcagtctcgccgaaatcaggctgcaagggcggatcaccgccaaaaaggagggttacacgacgcccccag

SEQ ID NO: 35902 - DNA, 260 bp, Unknown; identical to SEQ ID NO: 35896
  Description of Unknown: RightRegion for integrase B9903 sequence

SEQ ID NO: 35903 - DNA, 260 bp, Unknown
  Description of Unknown: RightRegion for integrase B9904 sequence
cctcctggggcgctgtatcatagacacatattcacccaccccttccgctatacactaaaatagcacccatcatccgggtgctattttagtgtatagcggaaggggtggcgccccagtgcttttgcaaaacatcctatgtagagcgtatcacgctaagccccagctcgcctgcagcagggataccggcagccacgattctcagcctcagccacgcctgcgaattcatagctgcgcagccgtaccacgcgtcagaggctgcc

SEQ ID NO: 35904 - DNA, 260 bp, Unknown
  Description of Unknown: RightRegion for integrase B9905 sequence
tttgtcaaaggattttttgttttgattacagattttgcgggaacattgcaaaaagaggtctgaaatagacctcttttgttgtgttccgtctaaaataggcgtttgaaatcgaaaaaacgcgcgagggtctgacgctccgctttacttaggcgaagctgtagagatttttaccccccttccgggtcgtgccgggccgccccctccctacccaggtgcagggcggcagtgttagtgcgctcatgcttgtacggtgcggtcgc

SEQ ID NO: 35905 - DNA, 260 bp, Unknown
  Description of Unknown: RightRegion for integrase B9906 sequence
cctcaaatagcctttgatataaaaaatgggtggatactttacacatttaaaagagcggcataataaaaatcctactcaataagtaggatttttatttcgataaaaggggttaatactcatcccctgtttaaagcctccgttatagagtatttacgttaggacatccgctcttttgggatttttacatctgtgtactttagaaaacctacggcatataataccgggcgagtcagttatttttattaaattttctgattagt

SEQ ID NO: 35906 - DNA, 260 bp, Unknown
  Description of Unknown: RightRegion for integrase B9907 sequence
gcttccggctacttttcactggttgaacaccaattttcggcccgtttgtggcgcaccgcataatctgtaattattttgtaatctttgcgcaaacaaaaaatgccccgccagcaatccgtcaggatgccagcggggcattgctttacttagtggagataccttgccaattcagatgcaacaaagcctgcgatcactgccgcaatgactgcccaccagagtttgtttccaaatactccgggggctttttccagcgcggtcaa

SEQ ID NO: 35907 - DNA, 260 bp, Unknown
  Description of Unknown: RightRegion for integrase B9908 sequence
gatggaaacaaagcaacattcgtattcacaaacctagtaaagatcacaaaaatagtaaaatagccattaggacatgcctagtggcttttttttatgcctttcactggacttttaatttttttgcggtattgtttgtgttggaggtgtaaaatgacacaagaagaacatgaacaatttataaaagaaggcggagcaacttgccaagattgtaaacaaagaatgctcaaagccgatgggtgtctattcccatacataacaat

SEQ ID NO: 35908 - DNA, 260 bp, Unknown
  Description of Unknown: RightRegion for integrase B9909 sequence
acaaagatactttcccgtacaaaggttaaaaattatgaggtagagctgaggcttgccgcttaatagattgtatataggtttttgaaaatattttataggttttgcctaatatctcacctcttttaccgttactacatggtaaaggaggtttttttatgatcaatcttgagaaagtagaaaagggtgaatatttccgggatgcctttaaggtatctttcaagtatagccctcagacagtggaaaagataaagaggctgggg

SEQ ID NO: 35909 - DNA, 260 bp, Unknown
  Description of Unknown: RightRegion for integrase B9910 sequence
ctaaagggtgttattcaaacctctagcggtatactacatcttagtcagaattattctttctgaggaaatttctcattaagcctctcttcccagtattccttaaacccaacccaattatacaatatataaataacgttaccacctattgcgtaaaagagttcctcacatcctccttcctcatcggtataggaaaaggattcaattcccacttcagggaatcttcttgatacgcgtctaatgtctacagcagacaaatcgac

SEQ ID NO: 35910 - DNA, 260 bp, Unknown
  Description of Unknown: RightRegion for integrase B9911 sequence
cccgccatcatttttgccggtggtctgatcggcctcgtccttccccgccctgtcgattcctgacgggaaaacagaaaagagcagcggatccacaatgggtccgctgctcttttgttattcgtctgtcttttcgtgttttccgaccacttcgccggagatctccgggaccggaggctcctcttccgctccctctgctttgtcgatcgcttgcttgtatgtatcgactcgttttttgaaccaggaaggaaccggagcgccga

SEQ ID NO: 35911 - DNA, 59 bp, Unknown
  Description of Unknown: RightRegion for integrase B9912 sequence
tcagcttttggtctcacagtaagcactccgctgaactggattacttactgccagcctgt

SEQ ID NO: 35912 - DNA, 260 bp, Unknown
  Description of Unknown: RightRegion for integrase B9913 sequence
ctccgaatcgacaagaagggcggatgggtggcaggcgccgagttcgccgccctgcccgcctgacgctcaccccttgcgctgttcctccaccgggtgtggcgctcgcgggttgctgctgccgaagtagtagcccagcaccagccccaggcccatatccagggtccccagcgtccgcatgatgatctcccgcatttccgcgggaaccacatgcgcgagcagccacgcctgaaccacgaaccatcccgcgacgatggcacccg

SEQ ID NO: 35913 - DNA, 260 bp, Unknown
  Description of Unknown: RightRegion for integrase B9914 sequence
tatccccacaagttatgttatcatcactatccgtttacacttgacataaccttgaggggataagcttcctcatgtaagacaacaggtaggagttgtttcgataacgcctacttgttgtcctaatagttgcagcgcacatttcgtcgcactccccggataacatctgccattatcgtatctgtatcgacaatcctttacaatgttcggcacaaaaaaattttaaagggtatctgtacatttgtcaatatatggaatattat

SEQ ID NO: 35914 - DNA, 260 bp, Unknown
  Description of Unknown: RightRegion for integrase B9915 sequence
tttggacgttatttgacgtcgaccgaaggcaggcgaaccgtccgcatttgcgggctggattgagctaggagcggatagcgcagccaccgccaggccagccaatgccggcgccagcttcccgaagaagcaattaaacctaaatgacgaaggttgttgtcagcgtggcccacaggctttcacccatgccgcccacaatcggaacgatgccagccagcagtgcagcgtgatattcgccaggcgcacgacgggcggatgatcct

SEQ ID NO: 35915 - DNA, 260 bp, Unknown
  Description of Unknown: RightRegion for integrase B9916 sequence
ttcaagtcggttagtgggttaggtccttggaccttgtggcttagccgatttgacgtcgcctgaggcgccgtcgacttttcgctggatcgcggtcgccaggagttgcgccaggcccttcagcgcgacctgctgctctggcgtgtagtcgcgctcaggcttgacggggaggcggaccggctcgggctcggacggcacaccgccagtctgcggcgtgccggcgtctaactaaaagactgaagatgcgtccaatgttggcgccg

SEQ ID NO: 35916 - DNA, 260 bp, Unknown
  Description of Unknown: RightRegion for integrase B9917 sequence
tttggacgttatttgccgtcgaccgaaggcaggcgaaccgtccgcatttgcgggctggattgagccagcagcggatggcgcaaccaccgccaggccagccagtgccggcgccagcttcccgaggtggcgatcaggccgaggtggcgcaacgagttattttcgtggcccatacaacccagcccaggccgaccacaggcgccaggatgccagccagcagtgcagcccaatgttgaccagacggacggccggcggatgctcga

SEQ ID NO: 35917 - DNA, 260 bp, Unknown
  Description of Unknown: RightRegion for integrase B9918 sequence
attgccaaggatgttctgaaggaatgtgtgtgggatggggatacgctttttcttacgctttaattttcccttttttattttgataccctctcccctcagaatgaaaaagagaaaaaataagagggaggccaaccggtctccctctcttcatgcttatttgcagatgcagacattgattttcttatctgctgccgcttttactgccgcctctgcttcctcctgagaagcgcattcctgggcaacctggatgtagcccggaa

SEQ ID NO: 35918 - DNA, 60 bp, Unknown
  Description of Unknown: RightRegion for integrase B9919 sequence
atgtgtttgacccttacagctatctggacaggaacgggcagtttgccggcatcgacgtgg

SEQ ID NO: 35919 - DNA, 260 bp, Unknown
  Description of Unknown: RightRegion for integrase B9920 sequence
attatcaatggtgggctactttgcttcagcctgccgaggcaaaaaaagaaccgagcggaataacccgctcggttctttttttctctattcttttgtgtctgcgggtgcagtctatataactgcttccattttggaaacagttgctaccccgcgtaggtacgcaagtcttcgactgcacgcggcacctgtcgcttattcgttctgagtttcgttagcctcgattatttcaacgggcggctcgtgatctgaatctatcttgt

SEQ ID NO: 35920 - DNA, 260 bp, Unknown
  Description of Unknown: RightRegion for integrase B9921 sequence
gcgacgatcttcttcgtcggcccggtgttcgtgctggccatgccgctcccagaaaagcggtaaacgaaataaggcaccttgcctcttgtgggcagggtgccttttcttctgccatcattttcgtggcatcacgaaaatggtcaagcccggaggtcattcctccgggctttttgcttcctccggctccggctcgatcagatcctcgatgtggcagtcgagggcctttgcgaccttctgcagaacgtaaacgtcgcggggtg

SEQ ID NO: 35921 - DNA, 62 bp, Unknown
  Description of Unknown: RightRegion for integrase B9922 sequence
aggaggatgcatgacccatggtcgatcatatgctcgtgcgtggcgcaaaggtccacaacctg

SEQ ID NO: 35922 - DNA, 62 bp, Unknown
  Description of Unknown: RightRegion for integrase B9923 sequence
accgcgttgcggttggtggaggcgatgggagtcgaacccatgtccgaaaagagttcagcgta

SEQ ID NO: 35923 - DNA, 260 bp, Unknown
  Description of Unknown: RightRegion for integrase B9924 sequence
accatacccttcatcagctcacattcaaccggctcacatgcaccgcaccctgctcagccgtgatatacgtcccctcagagtacatccgccaatgccaccaccccggcgcgtcaaaagtcacatcaagataatattccccagtgtccgaccgctcagccgccgtttcctccgtattcccttctggatccattacctcaaccaccacactcccaggatctacggctgtgccgtcatcatccgtgaacgttcccttaagacgc

SEQ ID NO: 35924 - DNA, 59 bp, Unknown
  Description of Unknown: RightRegion for integrase B9925 sequence
tcagcttttggtctcacagtaagcactccgctgaactggattacttactgccagcctat

SEQ ID NO: 35925 - DNA, 260 bp, Unknown
  Description of Unknown: RightRegion for integrase B9926 sequence
agaaattctattgagtttactgctcaggggtttgtcattatctggtatttcagtgaaaaatgacaatcggcagcgatgctatgcggcatcgctgcttttgttgtctatgccaagtcctgccaaattctgtaaaatcccgtcattgtcttgatgttatatatattatccgaattatcagactttttcgacagaatctgataagattttacatcaaggaggacaatggcatggggcgaatcaggatcaggatcggcaagctg

SEQ ID NO: 35926 - DNA, 260 bp, Unknown
  Description of Unknown: RightRegion for integrase B9927 sequence
agcaagaaccgccttaagtgcttgattttgcagttgccggactgggccaggaaggcggcgtgacatgatccggccacgttttgcacgctatttttctgtaggctggcgccatgggtaagccacgcctggagccgcttgattctgtcgatttccgctgtaataagtgcgggcataagtttacggctgcgccggatcctgacgggattgaagattaccccactgatgactggcaccccttcctgtatacccacgattgcgtc

SEQ ID NO: 35927 - DNA, 62 bp, Unknown
  Description of Unknown: RightRegion for integrase B9928 sequence
ttgcagattgttcgggaggtcatcatcaagggtgacggcacctggaccattctgccggtcta

SEQ ID NO: 35928 - DNA, 260 bp, Unknown
  Description of Unknown: RightRegion for integrase B9929 sequence
ggatgcgtgtttatcaggaaaaaggatgaactgcctaagtctaaacgtaaaccattgtgttgaaatgaaagaaaacgaaaatttcatatcttaaccaaacgggcggcgggcaaaaacctgccgcccgatttgagtttcttctaacagtatcgcgcgtgcgcgtgcgagggtcaagtcttactctttctggtgaatgaaattcataaaaaaaatccaaaaactaacgagttcccgggctcacagcgaccgcgtagagagaa

SEQ ID NO: 35929 - DNA, 260 bp, Unknown
  Description of Unknown: RightRegion for integrase B9930 sequence
acaattatattattttttgtgggcggtttgttcggcttatcagtaaaaacccgcgaggcgtgacgcttcgcgggttttgttttacttaatcttgctataaagcatttttacaaagttttcaccggctccgccggtttctttgtagccccaggccttttgtaacgccttaactgcattgatcgcgctgtcgtcataaacctttgactcggtgacgttgacgctatgcagctttttattataggcaagccggagcatttcct

SEQ ID NO: 35930 - DNA, 260 bp, Unknown
  Description of Unknown: RightRegion for integrase B9931 sequence
tttatcttcgtgaacggggttttcggtatcgtgcttgaaagacaagaagaacagggcgaatgaatttcgccctgttcttttgattgttcgtgttttttgctcaaaacaagcccgctgcgcagctgatccgttccggatcgcatccggatcgcgtcaaaattcccgaacaatcagaatcgacgaatgaagttttattgattgttttcgtcgtcgggtttgtcctggctttttttgacttcagaaccgtcgtcattcccctt

SEQ ID NO: 35931 - DNA, 260 bp, Unknown
  Description of Unknown: RightRegion for integrase B9932 sequence
cgtgctcgcgggaccgcgcgcgggcgggcaggcgctcgtgctgctgctcggggaactgaatgaggtttcccgtcctctgcgactctggggcgaacttgccgttgtagaacatgcggacggtcgcttccatcgcttcttccatgagggatgcgcggcgttcctcgaactcggcgcgcagtgcttcccgttcggtcaccaggcgggcggcgagggctgcgcgttcggctgccgtgtctctgacgaggcggccttgttcgttt

SEQ ID NO: 35932 - DNA, 260 bp, Unknown
  Description of Unknown: RightRegion for integrase B9933 sequence
gaatttttgcaactatatatgtacaaaaatattgcatatcaaatatttactatacaacaataatatttaaatattgttgtatgaatatatatgctataataaaagacgtgtcgataaatctcaccatttcatgatgttttaattaagtctgctaaacaagcagacttttcttttttcccgtttctattaactgtttaactttttcttttgcatcgtctaaatttttacaaccgtctaatatcacagaaaacattttaaga

SEQ ID NO: 35933 - DNA, 260 bp, Unknown
  Description of Unknown: RightRegion for integrase B9934 sequence
accgtgatcttcttcctcggttccgtgttcgtgctgtcaatgtcgattccgacagaattctaacaatccacaccagactgacaccgtttcgcgcggtgtcagttttctttttcgtctctccgaaaaacttttcaaaaattctaatgataaagatatgatattataatatcagaaagaagaacaacacctactgagaacgaggaggaaattaaaatgaaaatttggtatgccgttatgatgaacaacgaggataacgattg

SEQ ID NO: 35934 - DNA, 260 bp, Unknown
  Description of Unknown: RightRegion for integrase B9935 sequence
gaacacccgattgtgtggtttagccatgtgtttgcaataacagtaaaaatcccgcaagagtaatcttgcgggatttttctatgcttttgtgtagccctcatgcgtagagcgtagcggtggggtttttgaggaagtcagccagcggctttgcgtccatccaaccgctgatattccagaggctgtaccgggttccatcctctctctcaaagtggacggacaaacccttacgaacgaagcgggcaacgccaacaatccgctta

SEQ ID NO: 35935 - DNA, 260 bp, Unknown
  Description of Unknown: RightRegion for integrase B9936 sequence
aagaaatttcaacgagacaatgcaaacttcaaactgaagatatacccgaagctccctgtttgacagggggcttttaccgttatcctatatggggctatacattatcccatatatgctaatggttatttatttaccgcttaaattcgtgtttagttcacaaaaaaagcaccctatcatcattgagtgcttttaatttgtttattctttttttaccgaagattcattataactttttcctctaccataattacttctcgtac

SEQ ID NO: 35936 - DNA, 260 bp, Unknown
  Description of Unknown: RightRegion for integrase B9937 sequence
acctggtcgatcagcatgatcaagggggtgttcgtcttgactgtttattgcagtatcagataattcaaaagccagggttggacgacaatcgtcttgccctggcttttcctgtttacaactttttaataacgcattgggttagattctaacaaaatccagcggaaaaattccagatttgctatcatggctgtaaaggggtatagctatgattaggattcacttgtccgcccttctcggcaagaagcggtggacgcaggcaa

SEQ ID NO: 35937 - DNA, 260 bp, Unknown
  Description of Unknown: RightRegion for integrase B9938 sequence
gaggttatatctactggaaatgaaatatggggtgggggtttgtggtcactacgcagaatctaaaggagttgttgttcttataatggatgatcataaaaaatctgctaagggaggtttaaatccattatttgaaagccttgaaaaagctaagataattgattttcattcaggagaacaaccaaaacatatttccaaagaagatcttcgtataaattacgataacaaaaagtttttgttctggggaaatagtaaattaccct

SEQ ID NO: 35938 - DNA, 260 bp, Unknown
  Description of Unknown: RightRegion for integrase B9939 sequence
aaaagagatataaacgtaaaacctgtaggagcaacacctacaggtttattatttcttcagtaatataatctgataattcaagcatattattgatttcttgctcttctttttctatgatagatctcaagttatccatttctactaagccatttatcccaagttcagatgctctttccaaaatggattctaatttttttctcaataacttgtacctccataatttgatgatgatcaagaaacgataaagaaatttatgctgc

SEQ ID NO: 35939 - DNA, 260 bp, Unknown
  Description of Unknown: RightRegion for integrase B9940 sequence
aaaaaagatataaacgcaaaacctgtaggtgctattcctacaggtttattatttcttcagtaatataatctgataattcaagcatattattgatttcttgctcttctttttctatgatagatcccaagttatccatttctactaagccctttatcccaagttcagctgctctttccaaaatagattctaatttttttctcaataacttgtacctccataatttgatgatggtcaagaaacgataaatgaatttatgttgc

SEQ ID NO: 35940 - DNA, 260 bp, Unknown
  Description of Unknown: RightRegion for integrase B9941 sequence
aaaactaacggcactttgtggaatgaaccggaaatcgaacttgatatatatttgaaggtataatttttttgttttttatatccatcattgatgcgctagttcatccgcacattgatgatggatataatcaagaagcctatccgcgcggcgttttgctctttttactatttccaaattccggaaactatgataatataatcgcaaaaaccggagggaaaagaatatgggctttttaaaatctttgatggatctgttttcta

SEQ ID NO: 35941 - DNA, 62 bp, Unknown
  Description of Unknown: RightRegion for integrase B9942 sequence
ggctttttcccatttcataagcattttgcattgtccttctttgctttatacatctatcgtta

SEQ ID NO: 35942 - DNA, 260 bp, Unknown
  Description of Unknown: RightRegion for integrase B9943 sequence
gtggcagacctcgtgctccagggcgcgggcgagatcggcaggcgcgcgggcgagccgcgctgaggcatcgcaggcagcacgaaagcgcccctccctggactccatcactggagctcggggaggggcgctttgtcgtgcggtcaggcggcgagcttggcgatcaggtcggggcggaagccgctccagttctggtcgccggccacgacgacgggcgtctgctggtggcccagggagaccgcgtaggcgagggcgctggggct

SEQ ID NO: 35943 - DNA, 260 bp, Unknown
  Description of Unknown: RightRegion for integrase B9944 sequence
gacccatcgacaccgacaccgcccgagcgcgtgcctctcgcgccgcagagcccctcggcatgacggccacgatcatcaccagtcccctgtaccgggtccaggtcggccacggttgtgggttcgtcgcggagcagcccgtcgccccggagccggtccgccgccccgcgcgggtcgcggtcatgttggcgctcgcgcatcagctccaggcgcggatcaccgagggccgagtctgcgaccaggccgaggtcgcccgccggctc

SEQ ID NO: 35944 - DNA, 175 bp, Unknown
  Description of Unknown: RightRegion for integrase B9945 sequence
tccacgatacaggagatttacctaaatgatgacaatacgattaaagctgtagattttttataatctgttttgtactaagtgtttagccccatttggagccgacaaaacgatgactgctgtactttctggtgaagcagatatcggatttatggggtcggaagcttccatttacacg

SEQ ID NO: 35945 - DNA, 260 bp, Unknown
  Description of Unknown: RightRegion for integrase B9946 sequence
ctcaataggtcaagtttttttattgacctattgagaattaacaattttttatgcgagaagtgaaggcttccgtatgcttacaggaatgtaagtgtacggaagccttttttgttgcccgaaaaaggaaggaggagcacatggcagattattctataccagagcttttgaagctgatcgaagcggataccatatacattcccaagagcgttgctcggcgtgatgatatttatggtgcaagcaagacattgttcggcgttgta

SEQ ID NO: 35946 - DNA, 260 bp, Unknown
  Description of Unknown: RightRegion for integrase B9947 sequence
acccccgtgggggcatctctctataggcaaacattctcatatccgttatcctctaaaatttgatctgaatccaatcaaacattcagcctggaacttcttgtattcctgttgaaccataccgcagttagcgaataaagataactgctactgctggcatttttggaaataacttccatgcggaggagatgccgtccagaataggcaatgttcagttctgccgttttcacggtgttgcgaaccaacgatgcgttataccaatc

SEQ ID NO: 35947 - DNA, 260 bp, Unknown
  Description of Unknown: RightRegion for integrase B9948 sequence
gccgcctcgaagcatacattgacattgagcgacaaggacattgcggcatttgtgaccaaataaaaaatcaactcctttcaagcgaaagcccctcggattgtgaggggcttttctatttagtgagcattgaaagttctataggttcaagtgtcgccgcgaatgctttgagcatgcacagagtatcgagtttgttgggaggctcggatggcgcgggtattgtaattacatcccgataaacggctccaatgcttttgtcctca

SEQ ID NO: 35948 - DNA, 260 bp, Unknown
  Description of Unknown: RightRegion for integrase B9949 sequence
tatcttaaagaagaaattcaagaaataattaaccataaagaagatttaacaaagattgcttgaaagcgtatagggctagtaactaaaaaattaattctaaagaaaagagaaaagcgcccataattaaatataaaagaattttaaaaccctgaaggaattcagggttttttgtcaaacttatatattgtgggcaatagttcataattctaaacaataaaaatttaataaaatttcaggtatatttaattttaatatggtat

SEQ ID NO: 35949 - DNA, 260 bp, Unknown
  Description of Unknown: RightRegion for integrase B9950 sequence
ccttttacgtacgcatggagggatgatttccgaactaatcttgaacggtggatgtgtgcttaacgtgcttttttccgttctcacggctggcccgtttctttgcctcacttgtggattttccacctttgcggcccaggattacggcggcctcattaaaagatattttgtttgatttttcaacctcttttttgaatgggtaaatattgctttccagacattttcgataatattcccgcatccaatcaggagttgattcgttg

SEQ ID NO: 35950 - DNA, 260 bp, Unknown
  Description of Unknown: RightRegion for integrase B9951 sequence
aaggaaacacctgattccaaaatttcaattcatattcattataaaactaagtttaagatttgaagacacaaaatgaaaaagctataggaattaacctacagctttttcattttctatattattttttattttgtttcttttttctatttctcttagaatgactctagctgaagcttctctgtataatctctcaccttctgcaacactttcaggatcatatacataacttcgtgtaatttctactatcatctatttttctc

SEQ ID NO: 35951 - DNA, 260 bp, Unknown
  Description of Unknown: RightRegion for integrase B9952 sequence
ctagcgggtttcgatttaaccacaggtagtcctgcgcgtctctggcttcccttaaatctctgaaaacacgcgactttgttgcagttaaatccatgctcgaaaggagaagtccccatgaaggaaatcgatgatctggtcgctcaggtgaaggccagcgatgacgccgtggattccgccacgcttttggtgaacggagtcgcagcgcgcatcgatgcggcggtcgcagcggcagccagcctctcgcccgctgacaaggcgaa

SEQ ID NO: 35952 - DNA, 260 bp, Unknown
  Description of Unknown: RightRegion for integrase B9953 sequence
tcgtggacggaagaaatgaaagaagaagcaagaagaagggggttattaaattattatgcctaaagtaactaaaatagaagctactataaatccaaaaacaagactgccaaagaatcaattaacaaaaagaaaagttgcagcctatgctcgagtatcaaccgatagcgatgaacaagccacatcctattcagctcaagttgattattatagtcgctatattaaatctagacctgattgggagtttgttgatgtttataccg

SEQ ID NO: 35953 - DNA, 260 bp, Unknown
  Description of Unknown: RightRegion for integrase B9954 sequence
cactgtagattgaagtcccattcccagaagcgattctgggattatgacaccttcgtggtgtagtccagggaaatccaccctgcgccagatttcagcttaccccactttgttgcgccctgcccagtactttcctgcacgatggtataaactccaccgtcacggatagtgcctgccagagcatagttcgtacctgcacccttacggatattcaaaaccgaaactgtaactttcactctatacggagagaacgtaggcttgct

SEQ ID NO: 35954 - DNA, 260 bp, Unknown
  Description of Unknown: RightRegion for integrase B9955 sequence
cgcccgtattatatctttcttcggggtatgctgggccttgttcttgtccgatccattgattagatatgagcgctgcgattgctttggcggtttccatccgggccttccgcctcttctttttctttcccatcggcctttccctcctttcgtttattgtttcccttggaacgattatattaaaaaagcgccccggaatcagctcccggggcatcgttattttagcattttaccatccgttaaaataacggaatccatatttt

SEQ ID NO: 35955 - DNA, 260 bp, Unknown
  Description of Unknown: RightRegion for integrase B9956 sequence
agttcgaacctactctactcccagtcaattaataatattttaactataaatcaaaatggataatcatgatttaacttcagaagagtggaacggtttcggtaaactaggactaaatcttttaatttcagcaatagtactaataagcctatgttcgtccagtttattcctactttcacgtattatatttaaatgataatatggaaaataaattagaggatggttatcgatacgatgattatcctgaagatcctgataatatg

SEQ ID NO: 35956 - DNA, 260 bp, Unknown
  Description of Unknown: RightRegion for integrase B9957 sequence
tacattttcgtaaacggcgtattcgggatcgtgcttgaaaggacagaagaacagggcgagtgatacccgccctgttcttcatttttcgttaatgttcgtgttttggtcaaaaaacagcgctgctgcagctgcaccgtgcgcccggatcgtgaccagggaacctataaaacccgaacattcagagctgccggcagtcgtcaatgttcgtctttcggtttttcttcttcgtttttttcttttttctgctgcggttcgtcgcc

SEQ ID NO: 35957 - DNA, 61 bp, Unknown
  Description of Unknown: RightRegion for integrase B9958 sequence
atcaaaaacacaaaaaaggcgcatttcccagaattatttgcacggctgagcccctccggtg

SEQ ID NO: 35958 - DNA, 260 bp, Unknown
  Description of Unknown: RightRegion for integrase B9959 sequence
acctatacaaccaatcatcgcgatataaatcacttttcactgcaaagaggattatcttcataaatatcctctcttttttctatttcatctaaatatttttggtactcttcagggtgttcttcaacatattttacaataagtggcatcagtgcttcaaaattgttaatcatagatcacaatccgagtagttcttttttcttagctttaaattcatcttcagttataattccatcatcaaatagttgtttaaattttctaag

SEQ ID NO: 35959 - DNA, 88 bp, Unknown
  Description of Unknown: RightRegion for integrase B9960 sequence
gataacttcgagatctcccttttccctagagtcccaaagcaaattaacatcagtacatcataaccgatagctatgatgtactgaatct

SEQ ID NO: 35960 - DNA, 260 bp, Unknown
  Description of Unknown: RightRegion for integrase B9961 sequence
aaaggccatcagtcttcaatatttaaattaaaaccttacttcaatttcaattttattgcataacaaaatccccttttagggggtttttgcttaaccacataagttccgtttcatcggcactgatcaaggcgaagcggcccgctttaaaattgccttcttgtgaaagcgacagcaagtgccataaaaatttttcatcgcattttaacatttcttggaattccatgatcccccggttagcgatattcagttccccgtcaaaa

SEQ ID NO: 35961 - DNA, 260 bp, Unknown
  Description of Unknown: RightRegion for integrase B9962 sequence
ggccatgccccggtggcggagcggatggccgtgtaccgggagacgctacccgctgctgagtaggcgcgtctcctcgtccggtggtgtggcggccgtgatgcacggggacggctcggccgatggcgtcggcggaaggctctccggctggccgggcggcggcctttccgacggggtggctgcctccgccagccccggaccgtctgcgggagaaccgtcagggtgcggtgaggcgatgtagctgggaggggcctcttcggtcg

SEQ ID NO: 35962 - DNA, 260 bp, Unknown
  Description of Unknown: RightRegion for integrase B9963 sequence
atgccaagacatacgcaatctcgtaacaccccacgctttgaaatatcggctattgtaaaataggagagagatgctcatgttttatgatttaagccgccgggtcctcatcttcgtgattgcgttgtttttaatactggcgatgctatacctgattgccatcgagctgggctggatataaaagaaaaacggggaggggcataagcccctcccccagacttgttgatttattttgcgcaaaataattattgcgccggcggacc

SEQ ID NO: 35963 - DNA, 260 bp, Unknown
  Description of Unknown: RightRegion for integrase B9964 sequence
gtcaaacccgaaccgcgttacatcttcgttcgtggcatgatcgggatcgtcatcaccagatgacaaaaagagccggagcgcatgccccggctttttcgcgcacgaaaaaagcggggcacccgccccgcaatggctcagaatctccgcccgatgcactcgctgacgctgatcccctccgcggctgccgccttgcggatcctgtccgccacgtccgcggggagggagatgtgcaggtgggccagctcgccctcggagacctc

SEQ ID NO: 35964 - DNA, 260 bp, Unknown
  Description of Unknown: RightRegion for integrase B9965 sequence
ctctactgctatatttttgtagatggacgcgtcggaattgttgtgaaacgaccggaagtataaccggacataagaaaaagccgtcgcttcgcgcgacggcttttctcgtgcgactgtttccgctttggaaacagttcgttatacctttttcagattcgacgctttgacggcggcggtgacggtctttccgataccgatgacgacgcggtcgcctttgacctcgatgacatcgtacttgtcataatagaccttgaacttct

SEQ ID NO: 35965 - DNA, 260 bp, Unknown
  Description of Unknown: RightRegion for integrase B9966 sequence
cgacgagggcgattctacatcctgcagcgcggcaggatcatcgtggccgtggtcgatatatgagaaaagaggcggaattgatccgcctctttctctatgccttagatgtgaaatcgagggcgatccatctcggcgacttctttgtggagcttttcagctttccccatgtatatccgccggcttcctttacttctataatcgtatagactcccggctttatgaatgtgcttccgctcactttcactttgctgtagttcgtt

SEQ ID NO: 35966 - DNA, 260 bp, Unknown
  Description of Unknown: RightRegion for integrase B9967 sequence
gagccgaagcccgcgccggtgtgcgtgacggcgccggtggagacgctgcccgccgccgcgtagcccacctcacagggacccccacctggtcatccgggttgggggtccctgtgtgtaacggcgtggctcgcaccggcgatcagatcatcgtgtaacgtcgtacccgaatcaggtacaacgttcgagagtcaagggagtgtgatcacagtgggagtactcgaccggcgcgacgtcgcacggttgcgcggcgtcaaggcggg

SEQ ID NO: 35967 - DNA, 260 bp, Unknown
  Description of Unknown: RightRegion for integrase B9968 sequence
atgaaaaatcgtaataatgtagcttttacaatatcacaaattaaaactattataaatatctagtaatcatattttcatattttcatactttcatattttcatactttcatatttttttttatttttatttttattttttatttgttagttataatcaaaattaaacctgtttatataataagtaataagtaataagtaattctagatactaaacttataatggatgaaatagaaacagctattttagtattaataattgt

SEQ ID NO: 35968 - DNA, 260 bp, Unknown
  Description of Unknown: RightRegion for integrase B9969 sequence
gatggaaaggaagtgaccttcatgctcggcggcggcttggaaatagcagaaacacttaactaaacacaacgcgccaccgtgggaaactgcggtggcttctttttcaacttttcacggaagacattttcaaaacttacttatggcggaacgactttttagaaacactccgtctctccaagtttacgtttatagtaccaaagatgcaaatggtaatacattagtggctggtattaatgatattcggtccatgcaagttatac

SEQ ID NO: 35969 - DNA, 260 bp, Unknown
  Description of Unknown: RightRegion for integrase B9970 sequence
tcttacaggcgagagtctctgctctttcagcctgatgctgttgtttattatacactgctgtgattttcttgcaagagcgcgttaaaaaaagccccggctttcgcgagggctttcttgctaattcgaattagggccagcgaatgatatcgatcgtattgtcactcttcagcttggcttcctcctgggcttttaccttaggggggtgccttttgtaccagcgtgaccaccatagcctccttattctccacaggaatgatcct

SEQ ID NO: 35970 - DNA, 128 bp, Unknown
  Description of Unknown: RightRegion for integrase B9971 sequence
tttgtcaaaggatttttcgttttgataacagatttctccgggaaaatgcaaaaagagacctgaaacgggtctcttttgttttgtctcttccaaaatcggggtttgaaatccgaaaaacgtgctttctt

SEQ ID NO: 35971 - DNA, 260 bp, Unknown
  Description of Unknown: RightRegion for integrase B9972 sequence
gaaagaataaataaaaaagattttaagattcgtattactccatctttttattctcatgagtaggcaaacatctcattatgcacacactcataagaataaaattggttaaaaaattaaccagcaattaagctggtttttcttctttctttaataataatttgcctaatgctctatagtacttttgatatgtttcttctgtaggaggttctataggtggataaatttcaatggtacattcaccgttttttattatttctatt

SEQ ID NO: 35972 - DNA, 260 bp, Unknown
  Description of Unknown: RightRegion for integrase B9973 sequence
tatgaaatggtaccactagtgcgagacggtccgcccctattttccaagctgctggcggcctagccgacagctcgctagggagcgcacagagcggagcttgaggtttgcctccccgaggcattcggtcgcgtcgagatacgccctggcgaggtctccgttcgtctgaagcgatcgttccgggacgacacactccgccgtcagcgagtcagggatcggaggacaggtctcgacgatcaccgagcgcccagcgcacccggtca

SEQ ID NO: 35973 - DNA, 260 bp, Unknown
  Description of Unknown: RightRegion for integrase B9974 sequence
tatgaaatggtaccacttgttcgaggcggtccgccgttattttccaagctgctcgcggcctagccgacagctcgccagggagcgcacagagcggagcttgaggtttgcctcgttgaggcattcggtcgcgtcaaggtaagccctggcgaggtctccgtttgtctggagcgatcgctccgggacgacacactctgccgtcaggtagtcagggatcggcgggcacgtctcgacgatcaccgagcgaccagcgcacccggtca

SEQ ID NO: 35974 - DNA, 260 bp, Unknown
  Description of Unknown: RightRegion for integrase B9975 sequence
ctcgtggatgtcaccccggtgtgggagccgtgcgattgcgtggcctgcgagcgggtgcgctgatccggatcgttccgtatcgttccgtcttgttcagttccgttcacctttggcgaaaccgcaggtcacagcgagtgtcctttacagaagacgcgagtcgggaagtttcgtaaaacaagtctgcgcgagtcctacgccaagggcgagctggacgtgacgaccctggacggctagggcccgatccgcccggaagatgtgag

SEQ ID NO: 35975 - DNA, 260 bp, Unknown
  Description of Unknown: RightRegion for integrase B9976 sequence
tatgaaatggtaccacttgttcgaggcggtccgcccttattttcgaagctgctcgcggcctagcctacagctcgccagggagcgcacagagcggagcttgaggttcgcctcgtcgaggcattcggtcgcatcgaggtacgccctggcgaggtctccgttcgtctggagcgatcgttccgggacgacacattcggacgtcaggtagtcagggatcggcgggcacgtctcgacgatcaccgagcgaccagcgcacccggtca

SEQ ID NO: 35976 - DNA, 260 bp, Unknown
  Description of Unknown: RightRegion for integrase B9977 sequence
agagccttaatcagaaaagtgcaagtcacagctgatagcattgtcatcaagtggagaatatagagagagttttactatccctcatttcaatcaaggatactaaaattctttactagaaaatactttcagagcaaacaaaaaaaccgcaagcaaatgcctgcggttttagtgtaattaaattctgaaagcctttatatgctttatttttattttgctgtaatgagcccgtcaggctctacagtaaatgactctttatctgc

SEQ ID NO: 35977 - DNA, 260 bp, Unknown
  Description of Unknown: RightRegion for integrase B9978 sequence
atgagagagcaagtgcgacagaataatttgaaaaggagaaatcaagaatggcaaaagcagtaacggtcatacctgcaaagataaacccactgacaaagctacccacactttcgttagcaaagcgaagaacttgtggatatgcgagggtttcaacagataaagacgaacagttcacttcgtatgaagcacaggttgattactataccaaatttataaaagctaaccacgactgggaattcgtaaaggtgtacacggacgaa

SEQ ID NO: 35978 - DNA, 260 bp, Unknown
  Description of Unknown: RightRegion for integrase B9979 sequence
cccgaaaatattttgatgttggaaaaattttcaacgctaaaaaaagattttcttgttgcataaaatttttcaaaattttcaaacgacgaaaattcaaaaatttctctcaaaaatttttattcaaaaactcaatagtaataatggtttttgtaaatttttgtaataatatttttattgccgaaaaatcaatggcaattccccgaatgttcaatgaaaataattgaaagaggtttgagcattgccgaaaaaatcgtcgattt

SEQ ID NO: 35979 - DNA, 260 bp, Unknown
  Description of Unknown: RightRegion for integrase B9980 sequence
tatataggattggtagcgggggcctgcttcggttccaatatacgggagatcaggatcagctaggtggccggacgcatttcagcggtagaacggccagctcgcctgcaggccagtaacggccgaggcctgcaagtcttagctgtctcacttttccccgcttgcctcacggaacgaactcggctgtattgctattgccggcaggcagagatgccagatcagcgcgcttggtgaaggttgggcctgccgttacgtcataaagt

SEQ ID NO: 35980 - DNA, 260 bp, Unknown
  Description of Unknown: RightRegion for integrase B9981 sequence
cgtgggcggatccccggcggggggtacttcgatagcgacagcgttgaaatcacctggaagtagcggggccgaaaagcggaccgaccgccgacgcctggggggcaagtcggcggccggccgtttgtggggggcggttcacacccttgacacgttgctcacgtggagcaaggtcatccgtacggcttcacctatgtgagtggcatgtctccccgggatgagcacaaacgttcaagctagatccacaaatgtacggtcgacga

SEQ ID NO: 35981 - DNA, 260 bp, Unknown
  Description of Unknown: RightRegion for integrase B9982 sequence
aaagaggatttccgtcttgtacccgctgcccagtacagagggtacaaaagcaaccgggaatgacgaggctaagaaacgagtagccgcctactgccgggtatcctcaggcagtgaggaacagcttggcagcttaaatgcccagaccagttactatgaaaagtatataaacgataatcccgattatctctttgccggcatctataccgatgaagggatctccggcactgacctgaagaagcgggaagcattcaacggattaa

SEQ ID NO: 35982 - DNA, 260 bp, Unknown
  Description of Unknown: RightRegion for integrase B9983 sequence
gaggacaggttcagcgtaacttttaaatcagagattagtgtggatattgaaagggcatcgtaaaagccaaaagaatgtgagcatttgaaatgttacaaaactcagcctagggggggggggaaatcctctctaggctgtttttatgctaaactcaagctattaagcaaacgtaaaccttttaacgatagccttttcctatcgttaaaaagtgcacccactatccatagtgtgcactcaaaaaagtgtagctatactacctg

SEQ ID NO: 35983 - DNA, 260 bp, Unknown
  Description of Unknown: RightRegion for integrase B9984 sequence
accacaatcaccatgatttcaggcgtgtttgtgctgaccgtcgccttcatatcccgcaattgagtgaatgagcaaagatagaccagagatggttgtctttgctctttttcgttcttcgcttctgttttccaaaaatcgacgcaatttccatatttcggatggctcatacgaaaatccgaggtttcacgacagattcaagcggggcctgtaaaattatgctatactgctaccgaaaggagtataggttatgatcaggatca

SEQ ID NO: 35984 - DNA, 260 bp, Unknown
  Description of Unknown: RightRegion for integrase B9985 sequence
gagtgcgaggatctggttttttcccgcatttccccggaactgcaattttttgttgccgcgtaaggggaaaattaatattttaattttaaaaggagagaatcatgaaaaaaataatttttactgcatgtatcgcattgtttttcattgcggggtgcgagtatttcgaagaagatactttcaccgtgtattacctggtttccggcgagacgcaaaacgcagaaattcgttatcttgacgaagatgaaacagaacaggccata

SEQ ID NO: 35985 - DNA, 260 bp, Unknown
  Description of Unknown: RightRegion for integrase B9986 sequence
gtcttagatgacacaatatgtcaaataacattccaaaataacaagactatatttttccaatagcgcatgaatttttggtcgttttatgacattcgggtagttagctgatggcagaatgtcatttttgagcaatttttcttccatctggataaagaaaaaagccccaaaacacgggactttcagacatatttaacacaatgggcaactctcacagtatcagcatcgcatcccctaattgcatgctgtgcagaatcaggggt

SEQ ID NO: 35986 - DNA, 260 bp, Unknown
  Description of Unknown: RightRegion for integrase B9987 sequence
ctgagcctcgtcctcttcccccgcgtcccctcggctggggatggggatggatccgggttttagtggtggaataagtggtagcatggtgtgaaagatgattctttcatatcatgctaccatttatcgaacaatttaaatattacgaaaggatgacgtatatgtacaacgaattcagactcgatatgctatgcgaattggtcgatgcaggcattgacgacgacatgatgcgcaagatcatcgaggtggtggaccgggtcggc

SEQ ID NO: 35987 - DNA, 260 bp, Unknown
  Description of Unknown: RightRegion for integrase B9988 sequence
aagccgggaatcggaagatatgtggaaaatgtgttcaatcttgatatttttttgcgcctttaatatccaacataaaggcgcaagttcataggcgcattgatgttggaaatcacaaaaacattgatataaaggggatttctaatcatgacgaaaatcgaaaaactaaacaagctgctattatcaggaattatcacaaaagaagaatatgatgaacaaattgaaaagtatctgaaccacttcttctatctatttgaaatcgg

SEQ ID NO: 35988 - DNA, 260 bp, Unknown
  Description of Unknown: RightRegion for integrase B9989 sequence
agtgaagagaaaaggcaaaaacaaagggagatgattacatgcaggctacaggagcaaaaataacagtaagaccagcaacaattgggaggtactcaactataccaactaatctggcttacaaaaagcgagtcgcggcttatgccagggtatcaacagatactgaagaacagcaatcaagctacgatgctcaggtcaagcactactcaaagtttataaaggagaatgttgcttgggagtttgtagaggtgtatgccgacgag

SEQ ID NO: 35989 - DNA, 260 bp, Unknown
  Description of Unknown: RightRegion for integrase B9990 sequence
ggtgcaaatagccgtggttggacgcagccaacaccggaaatcaatattgaattaaaattttagctgtttcagaaacggcttatttattggcttttccccatgggtatctttgacgtactatctcatgcgcacgttaatgatacccatgggaatattcccttatgcaatctcattatatcaaaatattggaagattgcaatacaataggcaggtggaaaaccatctgcctatttctttattcagctttcacgataatagca

SEQ ID NO: 35990 - DNA, 260 bp, Unknown
  Description of Unknown: RightRegion for integrase B9991 sequence
ccccgtcgttcgggtagcttagcgcggtgcgccgtgccggcgcgggagggttcaaaagcatgagctaccgacgcgccagaatccccattcgcgtcctccaagtcctcacccttctcgtcggtgtcatctccgcgctgatgatgctcgcggcgggcgggctcgctttcagcgaaggtcccggccagggcgctgcggggatcgtgggcggggctatagggggtgcggtggccctcctctgcgccggggtctccgcggctttc

SEQ ID NO: 35991 - DNA, 260 bp, Unknown
  Description of Unknown: RightRegion for integrase B9992 sequence
aaaaagagccctgatggcttcaccattgaaatatacccgcgcatcccaaaatccgaaaaatgaaaagagagggccgtttcggtcctctctttcttatagttatcctgtttagccatactcatagggactgcccacgatgtcacccaaaattgctcctaacatggctgtttcctcccttacctatgatgccgcttctggaaatcagcttcgatttgttctttccactctgcgccgatggacgcgcagcagggtgcttcccg

SEQ ID NO: 35992 - DNA, 260 bp, Unknown
  Description of Unknown: RightRegion for integrase B9993 sequence
tataaatcaaaagggaaagaaacagaaaaaactgtgtttgattatcatattgaatggaaataagaaaccgtaggaattaacctacggtttctttaaatatttcgttattatattttatgtcatttcttttcttcaactcttctaaaacaagtttggcaatagtttctttatatatccttttaccctcttgaacgctttcaggatcaggagtacaaccttctgtataagttataatcatctctttcacctcgataatatgt

SEQ ID NO: 35993 - DNA, 260 bp, Unknown
  Description of Unknown: RightRegion for integrase B9994 sequence
aaaaaaagtcctgatggtttcaccatagagatatacccgcgcatcccaaaatccgaaaaatgaaaagagagggccgtttcggtcctctctttcttatagttatcctgtttatccatactcatagggactgcccacgatgtcacccaagattgctcctaacatggctgtttcctcctttacctatgatgccgcttctggaaatcagcttcgatctgctctttccactccgcaccgatggacgcgcagcagggtgcttcccg

SEQ ID NO: 35994 - DNA, 260 bp, Unknown
  Description of Unknown: RightRegion for integrase B9995 sequence
aaaaaaagtcctgatggtttcaccattgagatatacccgcgcatcccaaaatccgaaaaatgaaaagagaggaccgaaacggccctctctttcttatagttatcctgtttagccatactcatagggactgcccacgatgtcacccaagattgctcctaacatggctgtttcctcccttacctatgatgccgcttctggaaatcagcttcgatttgttctttccactctgcaccgatggacgcgcagcagggtgcttcccg

SEQ ID NO: 35995 - DNA, 260 bp, Unknown
  Description of Unknown: RightRegion for integrase B9996 sequence
gttacctgcaactttgagatctgggttacagttgatcggcgaggagggcaaccatctttgtgatagagatgccgcggactttggcttcggcggttctgttccggtcgctactccggatatccatcggatgtgtgtattatatcacaggttggctatcatcccgtccacatacgtcagccgtgccgtgatgtaaactactcctgctccagttctggttcaggtgtgacttcgtgcttgtagcactgatgcatcacaggaaa

SEQ ID NO: 35996 - DNA, 260 bp, Unknown; identical to SEQ ID NO: 35989
  Description of Unknown: RightRegion for integrase B9997 sequence

SEQ ID NO: 35997 - DNA, 62 bp, Unknown
  Description of Unknown: RightRegion for integrase B9998 sequence
cctttgtcctggcaatatttaatcaggtcaagcggcgtgttggagatgtggcagagtacctg

SEQ ID NO: 35998 - DNA, 260 bp, Unknown
  Description of Unknown: RightRegion for integrase B9999 sequence
gcaggtttatactcagttgaatggataaatgagaagaggttggcactaagtttgcatacataaaaatatttccttatgctaccaagggttatcttaagatagcccttttttttgtttctatgcaaaggaaatttagtcaattttgtacgaattcattttacagttttgatgactatgatagcattaaagcacaccaaccatagacacggtcctggtgatgtacgtcgtactagccaggaccaacttttcacaaggaggca

SEQ ID NO: 35999 - DNA, 260 bp, Unknown
  Description of Unknown: RightRegion for integrase B10000 sequence
cgaactattcagatccgcatgatcgctggattcttcgtagcggtggcacgactcgccgaatgacggcaaacgaaaacgccctcccttgatgggagggtgcttttctttgcgctcaggacgcgctctgaggccgctctgctcgtggatgagtatttgttcgtctgtgtgcgcggcgcgtctcagcgcaagccgtgcggtcaggattcgactgttcggagttcttgaacagttgctttttgcgttcattcctcctccgcctc

SEQ ID NO: 36000 - DNA, 260 bp, Unknown
  Description of Unknown: RightRegion for integrase B10001 sequence
acaatacaaaacacacgaatctacgataaagataaaaaactacttggtataaaggaggaatagttatgtctgaaccagttgttaaagttattaaagctaatccatttggtgctaaaaatcttccatcgtttgatgaacatttactaaaagttgcggcatatgcacgtgtttctaccgatagtgaagagcaagaagactcatttgaaagacaagttgattattacactagatttattcaatccaatccaaattggaaactt

SEQ ID NO: 36001 - DNA, 260 bp, Unknown
  Description of Unknown: RightRegion for integrase B10002 sequence
tatacgaaccccgccattgtttcaatatttgctcatgggttcgtgctcaccgttcccgtgtgacgggaaaacaatagaccagacgtatttcggtacgtctggccttttctatgcctgtcgtgcccctccgattccgtatgattcttccggtatttggaattttcttccaaattcaagcgagacgcacaaacctgtgatatattttctttcggagggaacctataatgatccgtattaaactttccacccgtctcggcgaa

SEQ ID NO: 36002 - DNA, 260 bp, Unknown
  Description of Unknown: RightRegion for integrase B10003 sequence
aagggttggcgagataaacagcgcgaacgcttggaaaaagaaaacaaaacggaggtgcaataatgccgattggaacaacaaagatcgtaaaggaaatacctgccttataccaccaaaaaaatacgatagttcccgatagaccgaacgtgacgtattatgcgcgtgtcagtacggagagcgaagaacaggaagactcctacgaacggcaaaaggcatatttcgaagaaaaaataaaagcacatcccgaatggaattatatc

SEQ ID NO: 36003 - DNA, 260 bp, Unknown
  Description of Unknown: RightRegion for integrase B10004 sequence
aaaagccaacaagtgagatattacgacaaagaacaaaaagaacccgccataagtcaccgctaaacactggcggcaactggacaagccctgaaatcacgcttgatgttaaactaagggtttaattatttgtaccttccatatccatcagttgtgcgcatattcaacagcgcgtcactgatggatataaacgctaaaaagacaatggcagcggaaaaagctagtgttttcagtgctttgcgtcgttatacaaaaacattccc

SEQ ID NO: 36004 - DNA, 260 bp, Unknown
  Description of Unknown: RightRegion for integrase B10005 sequence
ctaataaataaagtgataatcaatgaaaaaggggagatcgaaaaattgacatataaattttaattttttagtgtctacagtgataggaagggcgtgccggtataaacagtgtagaaaatacagtacacacaacatgtagatcgcttaacgaaaacatcaactatatattggcctgaaaaattcgtgtttaaccttattctttaaagacattgacattcttatggtgcttattattttttattccacatttgcccattttg

SEQ ID NO: 36005 - DNA, 61 bp, Unknown
  Description of Unknown: RightRegion for integrase B10006 sequence
cgaaagggcggcaccagtgcgcacactggtgcaaaaacatgctggggagagcatgttttta

SEQ ID NO: 36006 - DNA, 260 bp, Unknown
  Description of Unknown: RightRegion for integrase B10007 sequence
caccaccctccctattttgtcctggtccgcgggatgatcggcctggtgatcttccggaaataaaaaaagccgcctgcgtaaagcagacggctccttttttatttctgttcttcctcttcctcatctgagggcggttcttttttcacttccggcacttccgggagtccggtcgcaaggcttgttagaatagacaggacaaaggccacaccactcacagacagcgcacggagccactccacctccgaaaatgccgccccaac

SEQ ID NO: 36007 - DNA, 260 bp, Unknown
  Description of Unknown: RightRegion for integrase B10008 sequence
gattatcgcattttacgcaaccaaagccgaccttctgaatataagaaaacccttgtcatatgacaagggcctttttatttaaatcgttttcgattgtttctaataattcggggaaatttctaatctcgtttgacaccaaagcattcaattgttttccagtacggtgacatacaacttcattactttgtaaataatcgcaaaagataaatttaacccccgctttggcaggcgtttcttctgctaatatcatcatataaaac

SEQ ID NO: 36008 - DNA, 260 bp, Unknown
  Description of Unknown: RightRegion for integrase B10009 sequence
ataattgaaccactcttccagcttctcaacttgttttcagagataaaatcaaaaacagcttagtgttacaaaacagttacatacatgaatttcaactatatacgaccgaaatctaatagaaggaggggttgtagtagccgcaataccataaaaatattgggtattatagctgttttcagcctcctggcgatcgtttctgacgaaaatttttatcaaggaagtgctgttacaactgttacaattacctctcttaatataat

SEQ ID NO: 36009 - DNA, 260 bp, Unknown
  Description of Unknown: RightRegion for integrase B10010 sequence
ccttccggtgtaccaagagtttttgtcacggatcgttatatccgaatcactgtggcaaggtaaacaaagcctcctgatgtaatatcaggaggcttttctcatgctcaatgcttcacaatatcccgccaatagcggcccactttatcatcttcggcatcgccgtcatcaatgaagtcatgggccagagatgcccagatttcgggcttgtcggctccgtgtttgatcatggttttgccgtaatcggaaaacagcatattcat

SEQ ID NO: 36010 - DNA, 260 bp, Unknown
  Description of Unknown: RightRegion for integrase B10011 sequence
tgctcaccttccggtttctccgccggtgcttttttagtaaacttcactcagaattatcgatgagaaatgcctggtcaaaaagggcgtagctcggcgagcgggaatgtctgcgcagatgctttcggacatcatcgcgggaagaaaagtaatcagagcggacatgattccggcactggctgctgcttgctatgtcgagatcccggaactgttcaaagattttgagaaaggagcgtaaggatgaacagaaaacaggaacagag

SEQ ID NO: 36011 - DNA, 260 bp, Unknown
  Description of Unknown: RightRegion for integrase B10012 sequence
accaaatcctacaccaaatccggcagcgacatgcacgtcaccctctaccccctcgcggattgatggttatacatttatttggtacgcatgaatgcgtgccagataaatgttgattgaaagcaagcgaagatccctctccttgtggagagggatcttttttattttaccacgtgctcatagtagcgcagcagtttttcctccgcgcccgggccgtctttatcgagcaggaacgccttggccagagcagcgtagaactccgg

SEQ ID NO: 36012 - DNA, 260 bp, Unknown
  Description of Unknown: RightRegion for integrase B10013 sequence
cgaaccgtagccgtttacatggtcaagggatatttcgtctgtgacatctcgtttgccggataggcaaaaaaagggaccagtcttgattgactggcctctttttcgtgctccaaattaccagatgcggaatattcttccggaaaacggaatattcttccactcagccaccaaagccttccgttttctggtattatccgcgggaaggagcatggtcgaatgatcaagattttactctccatccgcttaggcgaaaagcggtg

SEQ ID NO: 36013 - DNA, 260 bp, Unknown
  Description of Unknown: RightRegion for integrase B10014 sequence
tctaaatcctattccaaagcaggcagcgatatgcgcgtgacgctatatccccttaccgattgattccgtgcgttccactatacttcgctatctactattacacggtacgcatgaatgcgtaccatttaaatgttgattgcaagcaagcaacattccctctccagaccggagagggaattttttattttaccacatgctcatagtattccatgagcttgcgctccggccccgggccgtctttatcgagcagaaacgccttt

SEQ ID NO: 36014 - DNA, 260 bp, Unknown
  Description of Unknown: RightRegion for integrase B10015 sequence
atcgacaaacacactgtagaattccaattcaactgcaacctaaatatcatagaaaaattataggaaccagagcatatcatcctggttcccttttttgcgtcatagatataaaagacttatagattattaataaaattatagtaatgaacaaaaagatgcattatgaaacattttgttcagtaaaaaggctaaatgaaacattttgttcactaaagccttaatatgcaacatttcgtccaccacacacattttttgaaatc

SEQ ID NO: 36015 - DNA, 260 bp, Unknown
  Description of Unknown: RightRegion for integrase B10016 sequence
accaaatcctacaccaaatccggcagcgacatgcacgtcaccctctaccccctcgcggattgatggttatacatttattcggtacgcatgaatgcgtaccagataaatgttgattgaaagcaagcgaagatccctctccttgtggagagggatcttttttattttaccacgtgctcatagtagcgcagcagtttttcctccgcgcccgggccgtctttatcgagcaggaacgccttggccagcgcggcgtagaactccgg

SEQ ID NO: 36016 - DNA, 260 bp, Unknown
  Description of Unknown: RightRegion for integrase B10017 sequence
accaaatcctacaccaaatccggcagcgacatgcacgtcaccctctaccccctcgcagattgatggttgtacatttatttggtacgcatgaatgaatcccatctaaatgtagattctatagcaagcggaaatccctcctggtgacaggagggatttctttattttgcgatatgctcataatacgccatgagcttctgttccggccccgggccgtccttgtcgagcaggaacgccttggccagagcagcgtagaactccgg

SEQ ID NO: 36017 - DNA, 260 bp, Unknown
  Description of Unknown: RightRegion for integrase B10018 sequence
ttgctggttcgaaacataaaaaagccgggcggcctgcataccgtccggcggatgaagaaatagcgaaacacgagaatgtcgccacctacaatataacaaaaaacgcccggggaaagagtaaaaccgggcgtttaacatatccgggcggaggaatagttcccggattcggaatatttataaaaagtttccctctttcatgcattcacgataaacgcgctctatgttctcaatagccagcgccgctttgccgttcctgaagt

SEQ ID NO: 36018 - DNA, 260 bp, Unknown
  Description of Unknown: RightRegion for integrase B10019 sequence
acgaacattttattaattactctaactatttttgcaataaaatttcgtataccacgcaaataatttttacagaatagtattaaatttatttgatcgttttttaaaaatgagttattctttgattataaatactcaaggaggtagctgcatgaaaaaaaaggctccatttggatatgattttagaaacgggaaacttgctgtcaataatgaagaagctaatattgtaaagtattgctttgaggcagaacagaattatatgg

SEQ ID NO: 36019 - DNA, 260 bp, Unknown
  Description of Unknown: RightRegion for integrase B10020 sequence
actttagaatttcttaaggactacaatatggtagtcgatacatctaagaaacttagtgtttagttacatataatcctattaaacaatgaaaggagagtccgaatggctctccttttctataaaaactctttgaactatgaaaacaaagagaaaaaaagtattactaatgttcttagtatatattcacgcaaataccttacactaactagcatttgacacaatttcgttcatttatatataaaacaaaaatatatcaatga

SEQ ID NO: 36020 - DNA, 260 bp, Unknown
  Description of Unknown: RightRegion for integrase B10021 sequence
atgaaagaaaaagcacgactagatgcattgaaacgaaaaacagttgcaggaggtagtgaataatggcaaaagtaacgattataccatcgaagataaatccaataactcagttacctcataactccttaaacaaaagaaaagttgcagcttatgcccgtgtgtccacattacaagatgaacaagtaagctcttatgatgcacaggtggattactacaagaagtatatttctgaaaggcaagattgggagtacgttgatatc

SEQ ID NO: 36021 - DNA, 260 bp, Unknown
  Description of Unknown: RightRegion for integrase B10022 sequence
ctcaccctccacatcttcccccgcctccccgacgaaacccccgaaaacgacgattttgtgtgaggtttaggggtagcatggggttttggatgaatcgctattatcatgctatccctattcgagcacaaaaaaaggacccgggggccgatcattacgatcagctccgggcgttttttattcctctgtgtcgtcaggcggttcctgtttgttgtactgcgccgtggagatgcccagcagcgcgcccagcagcgtgcagatga

SEQ ID NO: 36022 - DNA, 260 bp, Unknown
  Description of Unknown: RightRegion for integrase B10023 sequence
accatacggtggataccagaatgctgcgctttcgcaatagatttttctctgcgggtttcttgatttttagtatactatataggcgcataaaaagaaaaagctccgaattcacttccggggctctttctctgtgctcatgtgtagctttctactccgataccgtcagatccacgatcagatgcttctcacctgaccatccgatctctttcagcgcggccttctggacataaaccgctccgatctttgctgtagtgagatcg

SEQ ID NO: 36023 - DNA, 260 bp, Unknown
  Description of Unknown: RightRegion for integrase B10024 sequence
gaaaaggggactttccatcaaatttgtggaaaatcccctttagtgaccgcgaaggagtcatagaaatattttgtaaaaatttaaaaatcagaaacttacaacattttgcgtgtcattctcgtgacatttttttgcgtaattctgcaacattgtcttcaatattttgcaggtgagtcaataaatcttggtgggtaccgtcttttctttttgtgtcagggatagttgtgatggtatttttttcttcccttaaaagccagttt

SEQ ID NO: 36024 - DNA, 260 bp, Unknown
  Description of Unknown: RightRegion for integrase B10025 sequence
gacaatcttagaaccgctgtggaccatcagatcgaacgatgggttcaatggctcgcggcttaattgcaattaaatacgctgataatattaccaaattttatgacgaaccatttgcattctcggacatatcccccaaaagagtttttacctctatagatgacttttacagtccatccttgattattatatcctaatccagaccaattttcaaataccaggctatctgggtcttttgctgacgcttcaatggtttgttttac

SEQ ID NO: 36025 - DNA, 260 bp, Unknown
  Description of Unknown: RightRegion for integrase B10026 sequence
gacagcgaagttacctaccattgggataaggatggcaacatgcttagcgggcagatgctctaacgtgccagacgaggaagccgcctagttcgccctgcgctgtcttctctctgccaccttccgttgccgttgctgctcaaccctatccaaatccaaagccatcgcgtgtgggcaattctcatagcttgggaagatgcccctcgccgcgttctccgcgatcatatgccctcgtttgaaggcacggctggtcaactccttca

SEQ ID NO: 36026 - DNA, 260 bp, Unknown
  Description of Unknown: RightRegion for integrase B10027 sequence
gtgcgcagaaccgtatcacaagtgatagtaaagcggaaatgggagattgaaatttgttattagatactcattaaaggattgctacctattttttaaaattatggagatgttgtattaaagtttgaataggaattattaacaattgtttggattagtagcttaagataaaattgtagaaaagggaacgtattttcgttatgcttatttttataaaagttaagtataattgatgcccgaaaataaaaaggtatactaaaatg

SEQ ID NO: 36027 - DNA, 260 bp, Unknown; identical to SEQ ID NO: 35559
  Description of Unknown: RightRegion for integrase B10028 sequence

SEQ ID NO: 36028 - DNA, 260 bp, Unknown
  Description of Unknown: RightRegion for integrase B10029 sequence
acagcgcccccgcgcgaagttttcagatactcacaactttttgagagctggtgtactgcataaaaaaagtacctgaatcgacctcaggtacttgcacagatgttgatgtaagggcaaagacatctacatcaagtggcgactggtggactcgaaccaccgaagagcgttgcccatctgatttacagtcagacccctttgccgctcgggacaaatcgccgtaaagcgacacttttagggaaaggaaagtctcgctgaacctt

SEQ ID NO: 36029 - DNA, 260 bp, Unknown; identical to SEQ ID NO: 35583
  Description of Unknown: RightRegion for integrase B10030 sequence

SEQ ID NO: 36030 - DNA, 260 bp, Unknown
  Description of Unknown: RightRegion for integrase B10031 sequence
ttgaaaaaatatataacaaaagaattggaagatattgaacaatgggaggtaacaaatgattaactattcagagcagcagaggtatgatacttcggctgcaaaaattgacatagaatcaaataaacgaccagtcataaatgaagatgaagaacttattattttaaatgataactttcgtttagaagattttcaggtggtacgaagagaattttttgcacatcttactgaaccggcagtaacttttaataagagaaaattct

SEQ ID NO: 36031 - DNA, 260 bp, Unknown; identical to SEQ ID NO: 35667
  Description of Unknown: RightRegion for integrase B10032 sequence

SEQ ID NO: 36032 - DNA, 260 bp, Unknown; identical to SEQ ID NO: 35665
  Description of Unknown: RightRegion for integrase B10033 sequence

SEQ ID NO: 36033 - DNA, 260 bp, Unknown
  Description of Unknown: RightRegion for integrase B10034 sequence
tacaccgttgatctgggccgtgggaaaggctctgaccccttgctagatatacatttgctataaagggcatttcttttttgcccttcatagatatcctgtatgttctatcttaatagctcacacatgatatcaatgcgcttaaaccacattgaaccatgttttctcgctcttcctccttttagaatggttcaacagaaagtagtatattacacagaaaaagcattttcaacacaaaaagaagggccaggggaatcatcccc

SEQ ID NO: 36034 - DNA, 260 bp, Unknown
  Description of Unknown: RightRegion for integrase B10035 sequence
caagattatcgcgactttttcgactgtgtccgaatttatgaagacgaaaaattgcgagcataaaaaaagcccgcttttaaaaaacgggctacttgttaattcaatataagagttgaacaaagaatcaaagttcaaaaataaagtcatataaagcataagttcggtttaaccaaccatgcaagaatccgcgttgacttttaacttttgcgaactcgttatattttcggattcgcgctaaaaaatacgcgtcgaggtcgttc

SEQ ID NO: 36035 - DNA, 260 bp, Unknown
  Description of Unknown: RightRegion for integrase B10036 sequence
aatctacaaagcataactaaggagtatatatatgaacatagaaagtacagaaagaactattagagttattcctgcaactcaaatagcaataggtaaagtaacaagctccataacaagaaaagagcgagtttgtgcgtatgctagagtaagtacagataacgaagatcaacttaatagttataatgttcaatgcgaatattatgaaaacaaactaaaaaatgatccaagtatagtctatgtcggtttatatgcagatgaag

SEQ ID NO: 36036 - DNA, 260 bp, Unknown
  Description of Unknown: RightRegion for integrase B10037 sequence
cataaagataaatcagtgacctttaggtttatatgtggtaaggaaattaagattgaatactaaaaaatgagtcgagcagaatggcgaatttgctattctgtttttcttttgctttaagtcgtattcaaaaaaggtacgcaatcgtacgaaatcgaacgtaaaaatacgtacgtacttatttgtattaaagttgttttacttagacattttttgaaatctataagtcttctagtaaggcttattttttttgcattttatag

SEQ ID NO: 36037 - DNA, 260 bp, Unknown
  Description of Unknown: RightRegion for integrase B10038 sequence
cgaagaaaaacaggaggtggcagtgatggcaagaaaggtcacgactattccagcaacgattaacaaatttacggcggcacctattgccagcaatgtaaaacggaaggtggcaggttatgcccgtgtcagtaccgataacgatgaccagatatccagctatgctgcacaggtagattattacacaaaatatattaaagaacggaatgattgggagtttgtcgggatgtacacggatgagggtgtgaccggaacatccacaa

SEQ ID NO: 36038 - DNA, 260 bp, Unknown
  Description of Unknown: RightRegion for integrase B10039 sequence
ggtgtccgcaacgaaacacgaatcctgtgtgaaaatctttacaagtgggcaattgtggcataaacgaccctgtaaaatcctctcagcttgttgcgctgtagcgcagaattgagctacgcgaaatataggggtagggtaagcaaaacttaaataaaacgccatacggacgctctgaggggctatttaagttttttgattccataaattattccaccggctactacgccccctatgataacaccataggtgaagcggttgtt

SEQ ID NO: 36039 - DNA, 260 bp, Unknown; identical to SEQ ID NO: 35670
  Description of Unknown: RightRegion for integrase B10040 sequence

SEQ ID NO: 36040 - DNA, 260 bp, Unknown
  Description of Unknown: RightRegion for integrase B10041 sequence
acggtccatcgtcgaatcgacaaggtactcgccatcgccacgcgtcggcacgctttgccctagcactaagctcgtacgggttatttcaggtcgattgcttccatgcaaaccaaccgctcaaaagggcgaacggtgtaatataccctaagctgcgggcggcgaggaacccggaagctttcgtacacccagtgctctaggaacggagcgtcgtcattcctgaatttatagccgacaagttgcggctctaactggaggcgttc

SEQ ID NO: 36041 - DNA, 260 bp, Unknown
  Description of Unknown: RightRegion for integrase B10042 sequence
ccccagagggatggagattacacacgcaatcatatgctcaggatggtgatccatttgagctgaaaatgaggctattcaccttccggttccggtgtcggctccggttctggcgtgtcatggaagaaacatttctgctctacctgaaagccgtcgaagttgagcagggtcgcaccgtggaccggactgttggaagtcgcggcacgcgtcaggatctcatagtattttgcgtaggcgctgtcttcctgctctttggctgacgg

SEQ ID NO: 36042 - DNA, 260 bp, Unknown
  Description of Unknown: RightRegion for integrase B10043 sequence
aaagcaagagaaaggagtaaattacaatatgccaaacgtaagaataataccgagcaaaattaatccacttacaaagctgcctaatgaatcgttgcaaaaaagaagggttgcagcctatgctcgtgtttcaaccgaacaagaggaacaagcaaattcatatgaggcacaagtggattattatacaaactatattaataatcatcctgaatggcagatggttgatatttatactgacaagggtatatcaggtactaatttaa

SEQ ID NO: 36043 - DNA, 260 bp, Unknown
  Description of Unknown: RightRegion for integrase B10044 sequence
attaaagaaaacgccgaaacatttaatattgttgaaattaacacgcttttaaaagttgcataattgttttttgatttacaaaaaacaaaaataaaattttattgaaattttttgcatttgaatttatttgaaaatcacttgaaaaattttttaataaaaaatcccataataacaatattttggaattgatttttggcattaaaattgttgaattttttatttgaatttttacgcttatttttacaataatgaaacccgca

SEQ ID NO: 36044 - DNA, 260 bp, Unknown
  Description of Unknown: RightRegion for integrase B10045 sequence
gcgcgggagctggttctccactttgtagagaaggcggtcgccgtgctgatagaattgcgctgagaacgaaaaaagacgcccggagggataattccccgccgagcgtcttttagtttgtctgtggcgatatttcccgccctgctgccgggagggcggcaggggagatggtttacttcttgaccgacgccatggctgcgatcgtcttcgggcccacaaggccgtccgcttccttcgcgccgaacatgtcggtctggaacttc

SEQ ID NO: 36045 - DNA, 260 bp, Unknown
  Description of Unknown: RightRegion for integrase B10046 sequence
caatgggaggagagaaatcatggaggtagcaaggacggtaacggtaatacctgccaagaataatagctatgaatgtttcaaagaaaataggcctattaagaaaaaagtagctgcttatgcaagagtctcaaccaattttgatgaacaagtttctagctttgaagcacaaagagattactatacaaaccatattaaatcaaaaccagaatggcagtttgtgggagtatataccgatgaagggatatcagctactagcacaa

SEQ ID NO: 36046 - DNA, 260 bp, Unknown
  Description of Unknown: RightRegion for integrase B10047 sequence
cagacgaacttttcaatagttatgattggatttatgtttgttttgagttataaacatatataaaaaagagcagggtctccccctgctctcttttattttaaatattccgaggccgcataaacgaccttgccttcatagataaccttaacccagtggtatccgtccaccagcacaggcggctcaccgccccacatatacacaactgttttcgccggcagcgtgtcacagacgctgcctttaagcccgggcgatgtccggac

SEQ ID NO: 36047 - DNA, 260 bp, Unknown
  Description of Unknown: RightRegion for integrase B10048 sequence
ttcgaaccttcgaccgcctgcttagaaggcataattaaaaaatattttaaagtactgaaatagaacgttttgcaatttataacattattaatattcgtgaaatattcgtgaaattaatataattttatagaaaaaataaaaaaaagcggtttgcagtaatgaatactaaactgatgccccatcaatttgcaaaccgccgtaagatcccaaatcttagggtaaaggtagttaatttaaaaaagcatacgtatttctaatac

SEQ ID NO: 36048 - DNA, 260 bp, Unknown
  Description of Unknown: RightRegion for integrase B10049 sequence
cgtttgtcgccttctgtcggaatgaggcgactcgaacgcccgacccctacgtcccgaacgtagtgcgctaccaactgcgctacattccgtttctgttttgcgagtgcaaaggtaaggcatttttttgaaatcaaaaagaatttcacagaaaatttgtagaaaatttgtagaatcaaaaaatatgtctacctttgcaaccacaaacgagaagctaaggttttttattgaatgtgctgagaagtaagttcctatgtgcttaa

SEQ ID NO: 36049 - DNA, 260 bp, Unknown; identical to SEQ ID NO: 36007
  Description of Unknown: RightRegion for integrase B10050 sequence

SEQ ID NO: 36050 - DNA, 260 bp, Unknown
  Description of Unknown: RightRegion for integrase B10051 sequence
cacggcaagtacgcggcgcgcaggttcgacccgcgccgggtcgagatcatgaaggctggctagactgccggcgcgacagagaagcgcagaggccggccgcccccggacgcaacgggggcggcccgctgtcgtttagggcacatgcgaaaggcccccgatgccccgggggccttcgtcgcgcgcgttccgtctgctccctggaaggggaaagcaagggctaccgtacccgatccttcacacaccagcacactccgatgggg

SEQ ID NO: 36051 - DNA, 260 bp, Unknown
  Description of Unknown: RightRegion for integrase B10052 sequence
gaaatgaaggaaaccgcacggcaacgaacactgcaacgctacgcaccaaaggaggtggaataatggcaagagaagtaagagtaatccctgccagtgtacacaaatttacgaccgttcctttcggctctacggtaaggaaaaaggtcgcaggctacgctcgtgtgtcaaccgaccttgaagaacagctcacaagctacgaggcgcaggtggattactacaccaagtacattcagaataatcctgattgggactttgttgag

SEQ ID NO: 36052 - DNA, 61 bp, Unknown
  Description of Unknown: RightRegion for integrase B10053 sequence
atgtcaactgaagaaatgggtaagggtttgtataagcgcacatttgccccgctgaaaaggg

SEQ ID NO: 36053 - DNA, 260 bp, Unknown
  Description of Unknown: RightRegion for integrase B10054 sequence
aaacaaaccccggtgttcttcatcaacggatggtttgtggccagcttcccctttgccggataggcaaagaaaggggccagtctaaattgactggccctgttttcgtgctccaaattaccaaatgcggaataatcttacggaatacggaataatcttccagtggacgcgcatggccttccgttttctggtatcatccgcaggaaggagcaaggtcgcatgatcagaattttactctccgtccgcctcggcgaaaggcgatg

SEQ ID NO: 36054 - DNA, 260 bp, Unknown
  Description of Unknown: RightRegion for integrase B10055 sequence
accgaccatttaaacctgaccctgtacccccgcgtcactccggaggaaacatcggatatttaattatcgtttcagcggtagcatagtatctactatgaattcttcataccatgctcccataaaaaactcgccccgcgccatcacggcgcggggcttcttctctcattccctgtcgggcggttcgtcttccttttccctcatggtctccagggcgcgcctgatcttctccgggaagggcacgccaaggagggcggcatttt

SEQ ID NO: 36055 - DNA, 260 bp, Unknown
  Description of Unknown: RightRegion for integrase B10056 sequence
gaagaaaaaagaaaggaattcggagaacaattaaaggagaagagaagacaatgccgcaagtaaccatcatacccgcaacacggaaatatcaaaacggacaagcccaggcggcggttcggaaaaagagggtagctgcctatgctcgtgtttcgacagggagcgaggaacaggaaacctcatacgaagcccagataaattactacacgaactatatccaaagtcgctcggactgggagtttgtgaagatgtactcggacaaa

SEQ ID NO: 36056 - DNA, 260 bp, Unknown
  Description of Unknown: RightRegion for integrase B10057 sequence
cttatgattcatacctttacagtcaccgtacaccctcagaaacgtggaaagaaaaccgtgtgattacagaagtctgttgacctctctctgcacagcagtataatcatatcctgcggcagtcaacttgttcttacggtctgtaccgttaccccacttacctgcgataacttccttcgcaatctgagtcacagatttcttactggaagtgctgccctttgccagttcattgactttcgcctgaacctgagagtaattgtacc

SEQ ID NO: 36057 - DNA, 260 bp, Unknown
  Description of Unknown: RightRegion for integrase B10058 sequence
gatgaagctaaagagcttgctcgtcaaaagtcgattgaaaggatgaatagccaatgctattagaaaaggaaataacatttataccagcaacagtcggtagatttgcacccgttgttataggcatacctgataaaaagcgtgtagccgcctacgctcgtgtttcgaccgataatgaagagcagcaaagtagctatgaagcacaagttgattattacacaaggcagattgaagaaaaccctgcttggaaaatggttgaggtg

SEQ ID NO: 36058 - DNA, 260 bp, Unknown
  Description of Unknown: RightRegion for integrase B10059 sequence
agttggacagatgaaatgaaggaacaagcacggcaacatactttgaagaggaggaaatactaatggcaaaagcggtaacagtaatacctgccacaatacacccattaacaaaactgccatctttaacgatgatgcttcgcagaacctgcggttatgcaagagtatcaacagataaagacgagcaattcacatcttatgctgcacaggtagattattatacgaattatattaaatcaaagcctgaatgggaatttgtgaag

SEQ ID NO: 36059 - DNA, 260 bp, Unknown
  Description of Unknown: RightRegion for integrase B10060 sequence
atcgcgcgggccgtcataaagtccgccacctgggacggcgagactctaaaaattttgctttgattttcgcttttttatcatgcgacgctcgcgcctcagaataaaaacgagaaaagcccccggctgcacgaagcgaaccggggactcttctctatatggtggaattttggaggagcttgttatctgagcatgtggtcgacaagcctctgcactgctgtgtagtcgtagcctgcctgctccagtgccttctttcttgcggc

SEQ ID NO: 36060 - DNA, 260 bp, Unknown
  Description of Unknown: RightRegion for integrase B10061 sequence
aacgccccttcactttacgttctcgaaccatatccagtgatcgtcttcaagattgcaatttgagtgcaaaatcactgcaaaatcacgacaaagacatggaagtctgtacaaagtacaaaaaaagcgccccgggagaattcccagggcgttacttatagtcaacagttattcttcttcatcgggcggtacttcttcttccggaatctctacaattccggcattcgctgcatcgatcaggccttcaccgatgatataggcga

SEQ ID NO: 36061 - DNA, 260 bp, Unknown
  Description of Unknown: RightRegion for integrase B10062 sequence
tcagcgcccccagagggggtttctgtttactcgcaacttctcgaaagctggtatcaagtatgatagctcatcccccgtagcgttccagcagttccagcgtctcgggatcgtccagaatgtcgctgagacggcagtccagggcgaggcagagcttcagcagggtggacaactccgccttgttgatgttgcgctggccctgttccagagacgttatcattcatcattatctaaaatctgggtcgtgccatcatgcaccgcca

SEQ ID NO: 36062 - DNA, 260 bp, Unknown
  Description of Unknown: RightRegion for integrase B10063 sequence
agccgtctcgccccggtagtctggatcagccggggcactctgccacgccgccgcgcggcctaacccaaccaccacgccagccaggccagccacagccaatgcgccagcagcagggcgccgaatagggccaggggggcaagaatcaagaagcgcatcgcgcccgttccgccagggcggcatccacttcggcccacgccatctgcggaatgatggccccctcgcgccagcggatgcccacgaaagacttgcggatgcagcgg

SEQ ID NO: 36063 - DNA, 260 bp, Unknown
  Description of Unknown: RightRegion for integrase B10064 sequence
ctgtatgcggatcacgttgagataacagttcccattcaaaagagagggactgtgcctgaataagggtacagtctctctcttttcgtcttttcttcccaaagcaagagctcctccgacggtttacgccatgcaggaataatcctacggcaaaccggaataaaattacggtgcccatgcggattgatacggcatggagtatcatcacagcgaaggagctgctgcaaaatgattcgaattcgactgtccactctcctgggcga

SEQ ID NO: 36064 - DNA, 260 bp, Unknown
  Description of Unknown: RightRegion for integrase B10065 sequence
gccgaaccctcgatattagatttaacagacctttatagcatttttggtgagttggtggcgtaaaaaaagcgtaagtagcgaccttacgctttaacgacaatgaaatcaaaaaacatttgtcctaaatgtggctcacaaaaataatgtattcttacatttaaaatgttttctgcagttttaagcataccaacactacagaaacgtcggataattacggacaagaagccgctgcagcgcttaatagtcatactactacttcc

SEQ ID NO: 36065 - DNA, 260 bp, Unknown
  Description of Unknown: RightRegion for integrase B10066 sequence
ggtctagaaaaagatttctccactatctcgaatgaatataatatgcaattcattgatttttagaagtaagactagagacagtattctaaaagtcaacgaaagggtatcttaattgataccctttaatattaattaatatttatatttgtacgtatccctaaatataatttatctgttgttttatatccacctacaataaaatctttaaaatctattttctttttatcttcgtttaaattatctataaatttttttaattt

SEQ ID NO: 36066 - DNA, 260 bp, Unknown
  Description of Unknown: RightRegion for integrase B10067 sequence
ggcgataaaaaaggtggatacttatgcacacggtttgcggtgcgaataattatctacaaataagcaataaaaaaaaaacgccaccctgcacgcacataatgcagagtggcgtttcctagttgtgtccaagatgtgttaaaggaggtttacaagcgattcagcatatcgtcgataacccggtcagcggcagcctccagcagggcaattcctccaatcatgtttacccgcagaaaatattccacaaatccggtaaaaaatat

SEQ ID NO: 36067 - DNA, 260 bp, Unknown
  Description of Unknown: RightRegion for integrase B10068 sequence
gaaatgaaggaaattgcacgtcaaagagctttagaacaacatcgcagaaaggaaggtaaataatatggcaaaggttacagttataccgtcaaaagttaatcctataacgctaacaccgataggacaagtagtaaagagaaaggttgctgcttatgctcgtgtttccaccgatagcgatgaacagtattctagttacgaagctcaagttacctattacaccaatttcataaaaggtaagccgaattgggagtttgtaaagg

SEQ ID NO: 36068 - DNA, 260 bp, Unknown
  Description of Unknown: RightRegion for integrase B10069 sequence
gaaaagatcgattatagcagggaaaatgaaaaagaattcatactcgacataactcttaagtagtcgggtttctatttcgatcttggtgagtatcatgttggtgattcacttatacaaccgcaatgatacacatgaaatacaaaggagtgataaggcatgagaatcgtatggcaggacactaacccaaaagtcaagaagcctaagaataaaaccgcataacgaaaaaagaagagggtgtgtttaaccagcgaccctctttc

SEQ ID NO: 36069 - DNA, 260 bp, Unknown
  Description of Unknown: RightRegion for integrase B10070 sequence
tcctggacacctgaaatgaagaaaaaggcttcagaagctgaagcaaggaggagacaaaagtgagcatgcccgctcgtgttacggtactaccggcgaccaaaaaccggtataccaccatgcccattaagtccacccggaaacgccgcgtggctgcttacgctcgcgtatcgaccgacagcgaagagcagatgaccagttatactgcccaggtgagctactataccgattacattcagcgcaatgtggaatgggagtttgta

SEQ ID NO: 36070 - DNA, 260 bp, Unknown
  Description of Unknown: RightRegion for integrase B10071 sequence
gaaaaactgcgtttacgcagcgtttcattcgggatcgccattcaaagacgagagggcagataacgccctctcgtttttttatgtctgcgctggggcacgtcgtcgagaggtgcgcgcagtcctgttcaaataaaagtcagccggtgttttcaaccgctttcgtctcgatgtagacgtcgccgctatcaccgttcatttcgttcacctctgcttcgatcagaagtttagcttccgtttcgccacaaataatattccgctcg

SEQ ID NO: 36071 - DNA, 260 bp, Unknown; identical to SEQ ID NO: 36068
  Description of Unknown: RightRegion for integrase B10072 sequence

SEQ ID NO: 36072 - DNA, 260 bp, Unknown
  Description of Unknown: RightRegion for integrase B10073 sequence
atgaaagaacaagcacgattaagagcactagaacagcatcatggaggtggagaaaatgcctaaagtcacagtcataccatcaacaattaatcctattacacaaatgcctatccatgcgaatcatgttaagaaagtagccgcatacgctagggtttcaacaaacagcgatgaacagtacacgagttacgaggctcaggtgaatttctataaaaaatacattcaagaaaaacctgactgggagtataccgaagtttacgctg

SEQ ID NO: 36073 - DNA, 260 bp, Unknown
  Description of Unknown: RightRegion for integrase B10074 sequence
aaacccggcgataacctctccatcgtcgtttacccccgcctcccctccaatcccgatttataattcgccattttagagatagcatagtgtatgcgacgaatctcaaatataatgctatcctccatcatgtaccaaaaaacaggccctgccgtttttgcggcagggctttattttagcgttacgttaaatcgaacaataaggcttgacaatagcgttacgctgtgctataatagtatcaacaaaagcaagggaggtgatag

SEQ ID NO: 36074 - DNA, 260 bp, Unknown
  Description of Unknown: RightRegion for integrase B10075 sequence
tggacggatgagatgcgagaagcagcaagaaatcgaataaaggagagagtggtcaatggctaaaacagtaacagttatacccgcaacaataaacccattaacaaaaattcccgtgatcggcttgcacaaacgccgtaccgccggatacgcacgtgtatcaaccgacaaggacgaacagttcacttcttacgaagcccaggttgactactacacccaatacatcaaaaagaaccctgaatgggagttcgtaaaggtttaca

SEQ ID NO: 36075 - DNA, 260 bp, Unknown
  Description of Unknown: RightRegion for integrase B10076 sequence
aggatcgaattcagcagggaaaatgatgaagaatttatattggatgtgttcctgaagccttaactttgggaacacaagacctatttcctgacttcaggaatatggtctgaaatctgtatgcatcatgaatgtgcttcttttaaatcaccatcatgatacatacaaacctattgacgcaaatcgacttccaatattatacaaccaaacaccaaagaaaggaagatgcaaaaatgcgtgttgtatggaaagacagcaagccc

SEQ ID NO: 36076 - DNA, 260 bp, Unknown
  Description of Unknown: RightRegion for integrase B10077 sequence
gcaatgataaccgtcttgtcgtatggattcgtactggcaacccgattagagagcaggctttaagaggcctgttctctttctttttaggtagttgagtagtccgcgcaacaaagtttcttacgcgggtatatcgtacatagggggtcaatgtaaattcgctcttcttcctccttactttttcaaaaaatctttttaagttttacggactacttcaactaccaaagggataaaagccttaccgtgcctaactttttcaaggt

SEQ ID NO: 36077 - DNA, 260 bp, Unknown
  Description of Unknown: RightRegion for integrase B10078 sequence
ggtggtgcaccatttgtcacacatccgaactctcggatcgtgatctataccatagcggtataaaaagaaggccctgggcgcgatgcccagggctttcttttgccttacaggttgtacttgtccgtggggttgttgacaatgccaaaacccaccagcacgggcagcagcacgtccagcaggccgttcacggtttcgccgatgtccagcccggcgaactgcttagcgcagaacaccaccagcgcggcgatgctcgtccacag

SEQ ID NO: 36078 - DNA, 260 bp, Unknown
  Description of Unknown: RightRegion for integrase B10079 sequence
gaatacggaaaccgctggggcgaggctgcacctatggagctggacgttcatttgacggtctgatatttttttaatctttatatacatcatgaatgcgcagaagaatccgcacattgaggatgtacattagaaacataacaaagagactccccatttcggggagtctctcttgcgttagttgccgaagtagtacaggtagtctgcgtcatccttcacggaggaatacacggtaccgtagaggtacaggtagtcctttgcag

SEQ ID NO: 36079 - DNA, 260 bp, Unknown
  Description of Unknown: RightRegion for integrase B10080 sequence
gtaagtggggcgaacacccaaaggataactattctacagcgtggagccctttatgaagactgatagttgtcaagtttttgaggatcatttgagtgtcagaaagtacctattctcggagataagtgtaggtaaatttaaccattatccaaaattatcatgagaatattgaacttgaggtcatataactcaccttatggtataattgcattgcatgttaatgaaccacctttctgaatgagcccagtgctgcagcaccgggc

SEQ ID NO: 36080 - DNA, 260 bp, Unknown
  Description of Unknown: RightRegion for integrase B10081 sequence
ggcgaacccatcacggttcgagtctggcgacacgtcattatcatcactatcgatttaatctaaaaataagctccggcttttgccggggcttattttttccacgaaattcgtggttttctgttgacaatccacggaatccgtggtatcatataatcaagttaagggacaggaacaccaacagcaaacaaaggaggacaaagatgatcacaagaacttttgcagagaactacagagacagctacgaagcaggtatgacagtt

SEQ ID NO: 36081 - DNA, 260 bp, Unknown
  Description of Unknown: RightRegion for integrase B10082 sequence
aaggtacaaacggacggcaaattcacggttgttttcaagaacggtttggaaatagtagtgtaaaaaggagccaaggcataaagccctgactccccgtcaaaattaaattgacttaggaacggtggcgatattactcgtcatcgttttctcttgttccgcccttggtggtgataacaccttccgtggcatccttgaggttgaatacgatagcaccttcctccacgaaacgctgtccgggaatggaatagtacttggtgtca

SEQ ID NO: 36082 - DNA, 260 bp, Unknown
  Description of Unknown: RightRegion for integrase B10083 sequence
cccaccgaccacctgtccctcaccctctacccccgcgtcccctcagacgtggacgatgtttaatgctgcctttagtggtagcatagtgtgaagcacgaatctttcatgtcatgctactataaaaaccgccccgggatcattcccggggcggttgacttttcgagcatctttgtccccgctgcatcgacttttagcttcttcatcctcggcctcgtccatgccgctcttgttccgtcggcagcagtctaaaatccgcccgt

SEQ ID NO: 36083 - DNA, 260 bp, Unknown
  Description of Unknown: RightRegion for integrase B10084 sequence
tcggaaagctggacggcggaaatgcgagagaaagcgaggcagaaaaaatggcgacagtcctaaaaataccggcaaagtttcatcccataacgcatttaccggaaaccaaggtgcagaaacgcagagtggcagcctatgccagagtttccacggattctgaggagcagcagacctcttatgctgcacaggtagatcgctacaccaagtacattcaggaacgggcagactgggagtttgttgcagtctataccgatgagggc

SEQ ID NO: 36084 - DNA, 260 bp, Unknown
  Description of Unknown: RightRegion for integrase B10085 sequence
ggcgaacccatcacggttcgagtctggcgacacgtcattatcatcaccattgatttgttctgacgaatcaaacattaaacccggaaggtgccgtctggctgcctcccgggtttttatgtgcatagttgtccggatccggatcagctctatgctcttataggtctttgtctgccgaaatgcagcatcccgtcattccagtcacttcgcagaaggttttgatccggagcctcagggtgttgtcgtctttgtcgacatattcc

SEQ ID NO: 36085 - DNA, 260 bp, Unknown
  Description of Unknown: RightRegion for integrase B10086 sequence
atcgcgaagtccgtcatccgtgaggccacctgggacaacgagaccctttttattatgctctgatgttctcgtttttatcctgcgcccttcgcgtctcaggataaaaacgagaaaaagaccgactcctcaaagttgaggagtcggtcttcttttagtctctgccctgcatatagagtcctgcagagtatattgcatatattcccatcatcgcgagggtgatcccggtgccgaggatcacgaacatgatcaaggctatgatc

SEQ ID NO: 36086 - DNA, 260 bp, Unknown
  Description of Unknown: RightRegion for integrase B10087 sequence
caaagagagataacgaggaggtcaacaaatgccaaagataacagtaataccacagaagattaatccattaacacatattgataatctatccttaacaaaaagaaaggttgctggctatgctagagtttcaacagatagcgatgagcagtttacaagttttaaagcccagacagattattatgaaaaattcatcaaagctaatcctgaatgggagtttgtaaatgtttatactgatgaaggtatatcaggaactaatacaa

SEQ ID NO: 36087 - DNA, 203 bp, Unknown
  Description of Unknown: RightRegion for integrase B10088 sequence
ataatgaaaaatgtactgtcaggttgtacatggaatggagagactctttttgttaccttttagctcacttttgtattatgatacgttcaggccgcatccgcaaagctgagcgtatcaaatcgcgaatagatatttcagtacatccctctaaagttgcatttctggactcaagccggacaagattatcaattccctgtatctgc

SEQ ID NO: 36088 - DNA, 260 bp, Unknown
  Description of Unknown: RightRegion for integrase B10089 sequence
atcgcgaagtccgtcatccgtgaggccacctgggacaatgagacgctttttattatgctctgatgttctcgtttttatcctgcgcccttcgcgcctcaggataaaaacgagaaaaagaccgacccatcaaagttgatgagtcggtcttcttttagtctctgccctgcacgcagagccgaggattatctgacgtataaaatgccgttatggtatgcggcgatccatccggaagggcaccggatccagatgttcgctccgat

SEQ ID NO: 36089 - DNA, 260 bp, Unknown
  Description of Unknown: RightRegion for integrase B10090 sequence
tggcacgatgaaagctttgaaatttggattttacctaaaattaaatctaattttattttgtgaactaaacatcaatggttgactttatcaagccaatatgaatctgatgtgttattatctgaaataagagttaaaacttttctaacagtgtgtgcaagttctaaaggtcttatattcggtttatcaagtggattataactgaaattactatttaaagatatttgaattacattaacttgttttgaatatttttcagctac

SEQ ID NO: 36090 - DNA, 260 bp, Unknown
  Description of Unknown: RightRegion for integrase B10091 sequence
ggcgaacccatcacggttcgagtctggcgacacgtcattatcatcactatcgatttaatctaaaaataagctccggcttttgccggggcttattttttccacgaaattcgtggttttctgttgacattccacggaatccgtggtatcatataatcaagttaagggacaggaacaccaacagcaaacaaaggaggacaaagatgatcacaagaacttttgcagagaactacagagacagctacgaagcaggtatgacagtt

SEQ ID NO: 36091 - DNA, 260 bp, Unknown
  Description of Unknown: RightRegion for integrase B10092 sequence
tggacacatgagatgaaaaacaaggcgaaagatgaagcccaaaggaggcttggcaatggctaacattcgggttatcccggctctggcgcctattgtgtccgctcaggtgaaggatacggcgttcaagcggcgggtggcggcttacgcgcgagtttcaaccgacagcgacgagcagcagaccagctatgaagcacaggtggactactacaccaagttgattcattcccgaccagactggtctatggtcgatgtatttacgg

SEQ ID NO: 36092 - DNA, 260 bp, Unknown
  Description of Unknown: RightRegion for integrase B10093 sequence
attgtgccactgggcatcatggccgatgtaatcatttcgggcacttgcccgttggtctactgagccgcggcccggctgaacgcctgttgccccccgcccctgaacgcgcgctaccctcgccgacgtgcccgagcccaactggtcccgcctgacgccggccgaacaggcgcaggtgcgcgccgagatcgaacgcatcgagcgctactacggccggctccggttctggtgctcggccgcgatgatggcgctggtagccggcg

SEQ ID NO: 36093 - DNA, 260 bp, Unknown
  Description of Unknown: RightRegion for integrase B10094 sequence
gtgacgatagtcgtcttgccttatggtttcgtacttgcgacccagattaaggataggctttgagcctgtcctttttcttttggtagtcggtagtccgttttaacgaattttccttatatatacacgtaatgcgagggagcgacgagattgcgctttgagtccctttactttttggaaaaatcttcttagtttttacgaactaccagtactaccagatagccaaaggccttgtaaatcaaggactttcttcggtagcaggc

SEQ ID NO: 36094 - DNA, 260 bp, Unknown
  Description of Unknown: RightRegion for integrase B10095 sequence
ggtcagggccaactttacgcattggaaacacacccggtcattgcatttaagatagcgatataacgcaaaaaagcgccctgggatcatctcccagggcctccttttacccattttcttcctgatcatccgcgggaggtttcttttcaacctccggcagaccggtcaggcttgtcagaatactcaggactaaggccactccactcacagagagtgcacggagccaatcgatctccgaaaaagctgcaccgacagcaatcatc

SEQ ID NO: 36095 - DNA, 260 bp, Unknown
  Description of Unknown: RightRegion for integrase B10096 sequence
tcccaggcagcagagtgcggcaagaaaggtgcggctgcaaaagaaaggagaaggaagaagtgagtaaacaagtaacaattattccggcaaaacttaatcgtgcaacatttacacctttaaatcagcctgtaagacgcaaggttgccggatacgcaagagtctcgacagattccaaagagcagaagacttcctacgatgcacaggtatcctactacactgaatacattaaaaagcgtgatgactgggaatttgtgggcgta

SEQ ID NO: 36096 - DNA, 260 bp, Unknown
  Description of Unknown: RightRegion for integrase B10097 sequence
ccattaggacaaccacattattcgttatccctagacacgacaaggaaggacttgaaggcttaaaaaggcggagcattgcgctccgctgctttactgctcaaagacattattgcgtatgttgttgaaggctatcgctctgcgcttctcaagctctgcctggcattctggcttttcgactttgaggtcgagcaagtcagcatagtagcggtagaggcttgagcgccatttgccatcttgtagctcgacattgttgctgcaac

SEQ ID NO: 36097 - DNA, 260 bp, Unknown
  Description of Unknown: RightRegion for integrase B10098 sequence
gttaacgacatctgtacacaaggatgtaataaaatagaacggttcatatgggccataaaatgaatttatggcctttttatttaccgttattgacatttattttatagcccattcgctatataatacaaaagggcttttacttcatagcccaaattgcccttgcaccttgacaacttcaaaaatattgctcacgtagcaccttcacaaatcaacaaaggaggacttttatgatcgtaaccttaaaaacctttacacctgat

SEQ ID NO: 36098 - DNA, 260 bp, Unknown
  Description of Unknown: RightRegion for integrase B10099 sequence
attcatcttcgtgacgctaggagcataaagattgctctagataagcaaggaagacttacatgaataccctagcgcgcagcgttaccgctatacccgctaccaaaaaaccaggccacaacgttactgcctgtaacccattgttcaaacggaaagtcgcagcttacgctcgagtctctacagacctggaagaacaagccaccagctaccagacccaaatcaactattacaccacccatattcaatcccgctccgattgggaa

SEQ ID NO: 36099 - DNA, 236 bp, Unknown
  Description of Unknown: RightRegion for integrase B10100 sequence
acgccccgccaaaaatcgacaagtttcgacagaagcttgtcgattttactttttcactcttaactcttcactattcacttttttagtccttacacaaaaaaatcctgaatgcgttggcttaatagtgacaagtaactatttgccgcagagaacggtgtgacccgaaggtcacgccgtttttctgcgtccataagttgtttctgtagtaattgtttcggaaataacgggaatttcca

SEQ ID NO: 36100 - DNA, 260 bp, Unknown
  Description of Unknown: RightRegion for integrase B10101 sequence
gtagagcttatcattctaccttacggattcgtactggcttcacatctaacaagcccgctttaaccggtgggctttttgctttgcagcagagcagcagatttttcttatataatttataaaagtacgttttgagaatttttatatacccttttctctctaatcatacatttttcatttttataagaaaaaactgctgattctgctgatttagcctccaaagccttgaaaacaaaggatttttcgagcagcaggtatctgct

SEQ ID NO: 36101 - DNA, 260 bp, Unknown
  Description of Unknown: RightRegion for integrase B10102 sequence
accgtattccatgatggcagaatggttttccagtttgttgatgggacggagattgaagcataaagcaggaaacccactatggcattaagctgtagtgggtgctttttttgcttttcacaagaaaacgataggtgggtgcatactggaaaacgataactgaaaaagggtgcatttttactttgggagggtgcattttttgcccacaagaaaacgattacttttctcaaaacaccccaaagtgcgaaatcaaagcgtatttt

SEQ ID NO: 36102 - DNA, 260 bp, Unknown
  Description of Unknown: RightRegion for integrase B10103 sequence
ggaaaccgctggaagtccgaaggtttcgagctggatatcactctaaatgtacagccaatctaatttttccctatcacctacatcatagtggcgcgtgttcatctgctccccgatgatgtacgtgataaaaaaagaagggcgcgggcccctctcagctatttataatacgtgctgtgctatgtattcgctgatctctttaatgtcagtatcaccgaaaaactcaaactttacttttcccaaactactaaagtatagttcca

SEQ ID NO: 36103 - DNA, 260 bp, Unknown
  Description of Unknown: RightRegion for integrase B10104 sequence
tatgacaccattgacaatggcgtgaataagaaagtccctgtcctggaagtgtatatgaaataagggctgaaaattttttggcccttggttatagtcctgtatacgacattttaatgtcagtaacatgataagaaccatcaccagaccgcactattcgcccactataatcactacctagttttgcgaataccttattaaatgatacaccaacagaaatggtcagccctgtttcattacggacacggtttcggatttcatca

SEQ ID NO: 36104 - DNA, 260 bp, Unknown
  Description of Unknown: RightRegion for integrase B10105 sequence
accgtattccatgatggcagaatggttttccagtttgttgacggaacggagattgaagcataaagcaagaaacccactatggcattaagctgtagtgggtgcttttttttgcttttcacaagaaaacgataggtgggtgcatactggaaaacgataactgaaaaagggtgcatttttactttgggagggtgcattttttgcccacaagaaaacgattacttttctcaaaacgccccaaagtgtgaaatcaaagcgtattt

SEQ ID NO: 36105 - DNA, 260 bp, Unknown; identical to SEQ ID NO: 35619
  Description of Unknown: RightRegion for integrase B10106 sequence

SEQ ID NO: 36106 - DNA, 260 bp, Unknown
  Description of Unknown: RightRegion for integrase B10107 sequence
atcgcgcgggccgttatacgtgaggccgtgtgggacaacgagacgctttttattgtgctttgattttctcgtttttatcctgagcccatcgcgtcgcaggataaaaacgagaaaaagcccgacccatcaaaaatgatgagtcgggtctctttatctgtcccggaatatgtcgcagaaggctttccacacggcatagaagccgagcccccataggctgagaaggagggccagcactatgagaagcacaactgcgaccaccg

SEQ ID NO: 36107 - DNA, 260 bp, Unknown
  Description of Unknown: RightRegion for integrase B10108 sequence
ggttgtcctgcattatgggtcccccttcagggccttcataattgcaaaatacgcgcgatttaggaaaagacgaccagttggtcgttttttcgttttattgcttattttgcccggtgcgccgttgtcgtggcctgctcacaaaaaaagaggcagcgcgtctagaactcaggcccatcagacgggcccggctgtctctttctcccggccgattctccgcgggttcgtacatcctcagccagaggcgggtgatccgccttgtc

SEQ ID NO: 36108 - DNA, 260 bp, Unknown
  Description of Unknown: RightRegion for integrase B10109 sequence
cgtacaaccacagaaaaaagattaaaaacactggaggcgagaaaaaatgccaaagaatgttagaaagatacctgcgtcagtaaacttgtataatgcagcaccaatcactaataagaaaaaaagaaaagtcgctgcatatgccagggtttcaacagaccaggaagaacaattaacgagttatgaggcacaggttgattattatacaaattacattaaatcaagagatgattgggaatttgtcgacgtatatactgatgaag

SEQ ID NO: 36109 - DNA, 260 bp, Unknown
  Description of Unknown: RightRegion for integrase B10110 sequence
attgtaaacggagtacttttacactctctgagtataggcgagagaaatccatcctgcgcctgactttagttttccccacccattctgttcagagacaatcgtgtatatacccttgtctctgatacatcctacaatgggatggttcgttcctgctctgctacggatattcagtgcatcaacagtgacctttactttgtaaagcattgaagagtttgaaggcgtagaagaactagaagccgggtatacagcagttccatttc

SEQ ID NO: 36110 - DNA, 260 bp, Unknown
  Description of Unknown: RightRegion for integrase B10111 sequence
cggtcggcccagttccagccgcggcccgccttccggctggtcgtgccgatgggagcccgatgacagagctagcgctcgcctgcccctacacgtcctgtccggtgccgccgctgctgaccgtgccgaacctgaccctgcacctggtcgagcagcatcaccggccgcacggcgaggccttcctgaccgcgtccgggatcgaggagacggcgcgccgggctcgaggacctgccgccgacggggatggatcgacggaagcacgc

SEQ ID NO: 36111 - DNA, 260 bp, Unknown
  Description of Unknown: RightRegion for integrase B10112 sequence
tcagcgcccccgcgcgccgtttcggtatactcgcaacttatagagagcctgttcatattatagcgtttccgcccattttttcataaacttcgttattgacagcttttccttttcggctctggacgcgatcttgttgtgtgtagctctgtccacccgaatcataacgctgtccaagtctggcttcttcggataccgctcaggctcaccgagtagtgctttcgcctgcttgtcgtccacggattcgacatggtcaccaatga

SEQ ID NO: 36112 - DNA, 260 bp, Unknown
  Description of Unknown: RightRegion for integrase B10113 sequence
ctgccgactgcgcccccagaggcggaagcgttatactctcaattccacattcacgcgtggtgattattccccattcggttccggtgtcggttctggttcaggcggagtgtgcatgaaggctttgtattccaactggaatccgtcatagttcagcagtgtcgcgccgtggacgggactgttagacgtcgccgcgcggttcaggatttcatagtatttgccgtatgccgcgtcttccgattccttcgcggacggataggcgg

SEQ ID NO: 36113 - DNA, 260 bp, Unknown
  Description of Unknown: RightRegion for integrase B10114 sequence
ccggttcgtagcaagcacaagtggctccccgacctgggctcgaaccagggacctacggattaacagacccggtcgggactccgcgtcactcaacgatacaccggaaaacacacgcccggaagaggtcaaccgccggatcaggagaccgttgcacgaccagatcccgggcctgcagaccacgccgcagcgagatcggcgccggcactttggggctgtgtgcagacgtctgcacgcggcagggcatacaaccgcggcttggt

SEQ ID NO: 36114 - DNA, 260 bp, Unknown
  Description of Unknown: RightRegion for integrase B10115 sequence
atagtcggctcatatgccgagctgacattcaagttcaaaaacggagtagaaataacagtgtgaggtatatattatgattagaaaaattacatcagtgttatcactggctttatttatagtgataaaaataatgctttttttaggatatggaggataaaaactatgaatgatagatacacatttagaggctacagtccaaatatgtcagcagaatcaaaacacgaaacaggctggatatatggttacttagaaaacgtaca

SEQ ID NO: 36115 - DNA, 260 bp, Unknown
  Description of Unknown: RightRegion for integrase B10116 sequence
tccttcgtggacaccatgcgcattcgtgaagacggcagcatcgccgacattatttttttatgataatgatgcacctaattcagcgttgcccgaaggtgacgccgaattaggtacatcttttttcttattccgggatgaactccacgtcgcccggcctgccgctgacgaaatatccgtccgctgtctggtacaggacgccgtccggcgttgtgaacttcttcacagccttcttcacatcgaaggccgtcacgccgcagatc

SEQ ID NO: 36116 - DNA, 260 bp, Unknown
  Description of Unknown: RightRegion for integrase B10117 sequence
tctggtgtaccaaacgttttacatccgaacacgcgggtgacagccttccggctggccatctgatcggatgaagaaaagaccaccgaaatggtggccttttttttatcgaattcctcctatctctctgcattcttttaatgataaatcacaattcccgcattcttgtatacaggtttttgttttttctttctttatctgcttctccatgtcctcccggatcaagcgtttgatgtatccctggatgttttcctgcttctcta

SEQ ID NO: 36117 - DNA, 260 bp, Unknown
  Description of Unknown: RightRegion for integrase B10118 sequence
ctaaatgtggtagcgggggcgcgctttgttattaagaagcgccgccgctaccgagtggcatagccctgccacggcgcgagagtctacccacatgggccgcccctgtccaccagtgcgccgcatcgcttaataattgatagggaaaaccctgtatttttttcgagatatttaggtggatgctttaccctaaagtatttactaaaatcattgacactgcgcgcggcccgtgttttaatatccccacggtagctaatcagcta

SEQ ID NO: 36118 - DNA, 260 bp, Unknown
  Description of Unknown: RightRegion for integrase B10119 sequence
aaatccgaacctcgcctgatatgggtgcatcggatgatggggattgtcatcctccgcggataacaaaaaagccgggaatcgctcccggctttttcgctgtcttatacttcctccggctcgctcttgggcagctccagcaccgccgcctcgatcaggtcggagatggccgcgcagtcggcgtcgcccagctccaggccgtcgatcttggcgtagagctgggcctgggccatggcctctgttttccgggcctgattgtccca

SEQ ID NO: 36119 - DNA, 260 bp, Unknown
  Description of Unknown: RightRegion for integrase B10120 sequence
cacaggcgaaccatcatgtaccgcggctgcgcttatgtcattttgttcattccgcgccactgaacgaacgaacattgttttccgtaaagtacctgtgtacaggcgtagagacgtgggattagagatgcagtgatatcttaatttctttaagtatcacccgctattctctaattttacaaagttttatgatttttatgttcaaatgttcactaagtggagtttttggcttaaaaacgccaaaaacccagtgaacaatccag

SEQ ID NO: 36120 - DNA, 169 bp, Unknown
  Description of Unknown: RightRegion for integrase B10121 sequence
gtaattgtgaacagcaaaaaggacatgcggttcatctggaaagatggcactggggaagaatagccacaaagtgaataagaagaaaagggagcacctgcgaggatatttgccttgcaggtgtttttcttgtttttggcaaatatattaaaataatctgaaaatataaaaa

SEQ ID NO: 36121 - DNA, 260 bp, Unknown
  Description of Unknown: RightRegion for integrase B10122 sequence
cgggaaagctggacgattgagatgcgccaggcggcttgtgaaaaagcgaaagggaggcagtaaaatggcgtcaagcgtaagggttatcccggcaagcgttcgccaccactctgcccatggtgcgccactatccgccaagcgaagagctgcggcttacgctagagtttccaccgacagcgaagagcaaatgaccagttacgaggcgcaggtagactattacaccaagtacatcaaggaacgtgccgactgggagtttgtac

SEQ ID NO: 36122 - DNA, 260 bp, Unknown; identical to SEQ ID NO: 35982
  Description of Unknown: RightRegion for integrase B10123 sequence

SEQ ID NO: 36123 - DNA, 260 bp, Unknown; identical to SEQ ID NO: 35625
  Description of Unknown: RightRegion for integrase B10124 sequence

SEQ ID NO: 36124 - DNA, 260 bp, Unknown
  Description of Unknown: RightRegion for integrase B10125 sequence
attataaaaaaaattgttttcgaccgtcagatgaatgaatttcatttctactactatgcttagctgatcgtcacaaattatcaggctatttccagttgacataatactccattttttagtaaataacaatatatataaaaccccggaattccttgtaaacacaaggttttccgggcattcctataggtttatgcattttgggcccccggattgtaaaaacagataatgtattaaggtatctggctgcatactctgacagt

SEQ ID NO: 36125 - DNA, 60 bp, Unknown
  Description of Unknown: RightRegion for integrase B10126 sequence
cccaaatgggtatctgcttttttgcatatgcagaggaaggggctcgaatggttttatcca

SEQ ID NO: 36126 - DNA, 260 bp, Unknown; identical to SEQ ID NO: 35776
  Description of Unknown: RightRegion for integrase B10127 sequence

SEQ ID NO: 36127 - DNA, 260 bp, Unknown; identical to SEQ ID NO: 35625
  Description of Unknown: RightRegion for integrase B10128 sequence

SEQ ID NO: 36128 - DNA, 260 bp, Unknown
  Description of Unknown: RightRegion for integrase B10129 sequence
tctacacctatcgaaaaaacagaactccttttgtccctttttaataatatcaagactgcttaacccatgcccaacctccaaacccacttcgcctcattgcaccaggatgctatcacctggaaagctgggtatatttacaaccaggccaccaaccctgccgacaaagccgccgccattgatgccatcgccgccaccatcacctgcatacccggggtaacagcccaaaccacctatgccgctgaaatagaacatcagttaaa

SEQ ID NO: 36129 - DNA, 260 bp, Unknown
  Description of Unknown: RightRegion for integrase B10130 sequence
gggaaaggcaacgagattggtttccagctagacattttcccaaaaatccagaagaataattaatgatatcttctatgtgctgacgaattggctcattgatgttatcagtaattaaaaaaagaaattcccggggctaattccccgggatatttttactgcttcttaatatattttgcagatgcaaagccataatactttcctgcaatacggatataataccacttactaccgtttttatctttctgggtaaaattcattac

SEQ ID NO: 36130 - DNA, 260 bp, Unknown
  Description of Unknown: RightRegion for integrase B10131 sequence
caatacgtctttgtaaatggcgtgttcggctgcatcttccataggaagaaggacgaggattgacagcacagcgccgggtgaaatatcccggcgctgttcctgtattcagaggtgaaatcaggctcaccgtcaatttcattcccgcatcaggcatcagggcaaccgccgccctggtgcctatttttgcccccttctaattatccgcgcgcgcgtgcgcgaggggccttttctggcctgcccaggtgaatgaaattcataaa

SEQ ID NO: 36131 - DNA, 260 bp, Unknown
  Description of Unknown: RightRegion for integrase B10132 sequence
acggtgtttttcttgccgcaagttttcggaattgtcgcattgataaaaccgccgaggggttagccctcggcggttttgtttttttctttagggcaaaaagaaaaagccgggggctgtgcctccggctttttgaatacttatgtgttcggcttttcgatctcggctacaagggcggacggggagatgcgcagggcgtaggagaggcggaagacggtctccagcgtcgggcggcgggtgccgcgctcgatctgctcaaggcc

SEQ ID NO: 36132 - DNA, 260 bp, Unknown
  Description of Unknown: RightRegion for integrase B10133 sequence
tctacgatagaatatagtcgcgaacgtccaggtgaatttatactagatatagagcttctctgatacctactaccacatatagtaggtattctttaacacatacatatccatcataagtatcttcctttcgacagatgacagggaacgttcgctgtgtaaccaaattccgaagtattccacggcacaacagttattcccgtttcccgggatgctccatgccagttgttgtacgtactggaagtatcgtttacaaaattatc

SEQ ID NO: 36133 - DNA, 260 bp, Unknown
  Description of Unknown: RightRegion for integrase B10134 sequence
attgtccgggctgtcgtccgggagtgtacatgggacggtgagaccctttttcttagactctaatcttcactatttcataatgcgtatgagtaggatgcatgatgaaatagtgaagatttaaaaaagagcgacatggccgaagcctgtcgctctttggatccgcgccggagcataggctccggttttattttttcatgtttttgatggctgccagggtcttcttgccgaactttccattgacttccaggccggccgccttc

SEQ ID NO: 36134 - DNA, 260 bp, Unknown
  Description of Unknown: RightRegion for integrase B10135 sequence
cccgagatgagagcgcgaacaggtcagcagacaagagaaaggagcaagaaatgccgaaaataacgattatcccgcagaaactgaataaggcaactttcatgccgctaaatcagtctgtaaagcggagagtggcaggatacgcccgtgtgtcaaccgactctgaggaacagcggacatcatacaccgcacaggtagaatactacacgaattacatcaaaagccggtcagactgggagttcgttaatgtgtatacggatgag

SEQ ID NO: 36135 - DNA, 260 bp, Unknown
  Description of Unknown: RightRegion for integrase B10136 sequence
actttcctttctggtcgcgctctaatggttgcgaaggtgtcacgttcccgcctttcctattgatgacctaccttagggcggaaacaaaaaaaagagagcggcttcggccgctcttttcttttagtcctcgatcggatcgtccgggaggattatcggctcgggctccgggttgacctctatcggtctccagaaccactcgcgctgcttctctctgatgcgttcccgcagcttctccagaagagtctctctcattgttcctc

SEQ ID NO: 36136 - DNA, 260 bp, Unknown
  Description of Unknown: RightRegion for integrase B10137 sequence
agcgcgccgggtgataatctggagatccagctgttcccccgtatccccacagatgacgattgattatttgcctttttaaggatagcatggcatgaacaatgaattatttttatcttgctatctctattccaaaagaaaaaggcataggtcctcgatccgggcatctccggatcgaggacctatattaatctccgtttcgaccgtcaacgtcgggcggtttgtctttcgtctcccgcatggtctccagcttctctttaatc

SEQ ID NO: 36137 - DNA, 260 bp, Unknown
  Description of Unknown: RightRegion for integrase B10138 sequence
atgcacttatccgaacacatcatatttgtaaatggtgttattgggatgatcgtgcaaagataaaaaaatccctctccagaccggagagggatctttttattttaccacatgctcatagtatttcatgagcttctgctccgggccggggccgtctttatcgagcagaaaagcttttgccagggcggcgtagaattccgggcggttgaggccgaactctacggcgacggggtagtagtccgagtacatcatgttcatggtca

SEQ ID NO: 36138 - DNA, 260 bp, Unknown
  Description of Unknown: RightRegion for integrase B10139 sequence
gggaaaggaaacgagattggttttcagctagacattttcccaaaaattcaaaaaaatgattaatgacatcttctatgtgccagttcgctagcgcaatgatgctatcattaaatttaaaaagaaactcccggggaattaaccccgggatattttatacttttttgatgtattttgcagaaacaaaaccgaagtactttccggcaatgcggatgtagtaccagtcggctttgtcttttgctttaatgatatcacatacatcg

SEQ ID NO: 36139 - DNA, 260 bp, Unknown
  Description of Unknown: RightRegion for integrase B10140 sequence
ccggcatacatcttcgtcaatggcgtgttcggctgcatcttccctcggaacgatgtagaatgaccgggtgatttcacccggtttttcatttttcggtgtgaaattgaaaataaggctcatttcactttcaactttgcaaggcagaccgtcgcgtgatggtctgcctttttcgtatttcttctaaagcacgcgcgcgggcgcgggcgcgtgagccaacccctcacgcaaccccttcaaaagtgaatgaaattcataaaaaa

SEQ ID NO: 36140 - DNA, 260 bp, Unknown
  Description of Unknown: RightRegion for integrase B10141 sequence
gaaccactccgcctgatctggtacatgcacctggatgtgttcgccattgaaggcctgctgtaaaagaaataccccggaagctcaatagcctccggggtaaaatgttggataatgttggataatgttatgtgtagctgttactcctcgcgcggctcccatccgctgcacttcatccctttgtcatcaaagtttatggttttatcgccggtatgagtgcagtcaatgttatgctttccgttctggatcaaagtcatgcttcc

SEQ ID NO: 36141 - DNA, 260 bp, Unknown
  Description of Unknown: RightRegion for integrase B10142 sequence
gaaaaacgggctgccgctgctgaatcatcaaaaacaaggagatggaaaaaatgccaaaagtaacaaaaattccgccaagattaaatcctgccacttttgcacctttggagagtgttgaaaaacgaaaagttgcaggatatgcaagagtttcaactgattcagaagaacaaaaaacttcctatactgctcaagtggattactatacgaaattcattaaagaacggatcgattgggaatttgtcggagtttatacagacgaa

SEQ ID NO: 36142 - DNA, 59 bp, Unknown
  Description of Unknown: RightRegion for integrase B10143 sequence
tccgaaacggatatcaccgcttttggcattttcgggaagaagggactcgaacaatttaa

SEQ ID NO: 36143 - DNA, 260 bp, Unknown
  Description of Unknown: RightRegion for integrase B10144 sequence
agtggacccccgtcgagattcagattttttatttgtgatgctgtaatagcatctcgggggtgatgaacgacaccctcggtgcttatactgcataataataaaagtggagaccgtcaaggcctccgcttttttataatatgtattccgcatccttttcaaaagatttcacgacggattcaaagtcctgcgctttcagggtttcaagccatgcggcgcggttggattttaattcaggatgctttccgatctccgcttcaatt

SEQ ID NO: 36144 - DNA, 260 bp, Unknown
  Description of Unknown: RightRegion for integrase B10145 sequence
cgctccgtcccttatctgctagagccgttcagggtcgtgctgcgccgcgcaagtcgggaatagtactcgcccaaccgcacatcgtctacctcccgggtgtactgtctacctcatggacgtacccgtggcaggaaaagccacctctcacgcgtaggtcggcatctcgtcgtagatccgaccccccaagtcccggccgttcgccttcttggacctcttcacgccgtccgccccgtacgctccccactgtttgaagaagaagg

SEQ ID NO: 36145 - DNA, 260 bp, Unknown
  Description of Unknown: RightRegion for integrase B10146 sequence
tggacagacgagatgaaagaaaaagcaaggaggagaggtttatgcaccaagcaacagaagtagttgttatacccgccaaggcggtcgaggttttttcaccgcttaccggtacgggggtaaaaaagcgggtggcggcgtatgcaagggtttcgacaagcagcgaggaacaggaaggcagctacgaagcccagattaattattacaccaaatacatcaaggaaagaccggaatgggagttggtggatatctataccgatgag

SEQ ID NO: 36146 - DNA, 260 bp, Unknown
  Description of Unknown: RightRegion for integrase B10147 sequence
gcggtggctcctggttgcaggatgcaccacgagaacgggctgcggatccgcctggttgcgtgagctggccagcagcggctccccggccgagacaggctgatcgccgggaaacttttcgagcgctcttttggtgaggtagccgacacaggcgacctatcagcgcgtcgttgctttggattttgatgcggatggctgggaaatccgcctggttgcgtgaccgggccggcgggagcggcagccgttcggcgatcccgaacagc

SEQ ID NO: 36147 - DNA, 260 bp, Unknown
  Description of Unknown: RightRegion for integrase B10148 sequence
cagccggacgacccggacgacgcggaagcggcagagctggcggcgctagtactgacggtgtgatctgagacacattgggtccggcttcggtcgggccctctgtgttttggtgaggcttacctaacttcactcagaggtgccagactggtcacggagcgaatccgtccgagagatcagcgcacaacagcgcaaggggagcgggcgcgagcgtccatcgggtcaccatctctgacctgcggtttagtacgttcggacgttca

SEQ ID NO: 36148 - DNA, 260 bp, Unknown
  Description of Unknown: RightRegion for integrase B10149 sequence
gcaggattcggacttcatctgtccgggaggatcgagatcccgctccgcttgaggcgcgcatgatagagccaggaggccctgcggcgcaaggctgaacggatcaggtcgccccaatgcatggtgcctcgcggccgattcccccccgtcgagacgacccagacccacgccgacgccctggccgaccggctttagcccgcaacctcttgcccatggatgtagcaggcccagttgaccgtggtggccgcagcgcccgtggcttc

SEQ ID NO: 36149 - DNA, 260 bp, Unknown
  Description of Unknown: RightRegion for integrase B10150 sequence
gctggcgggacttctaccgaactggcggcgttgtttgcgctggcgaaactatttgtggcgtgagtgctaaagcttaattttcaatatttggcctgaaatttttacggttttttaaagccaaagcctcctgaatgctcatatctttttcttgtgttgcgctccagttgtcccgcatcatacgggcaaattcatggccgctttcaaaaggcacaagcatcgggaataaatacagggcttcgcacatttgcaggtactgtttt

SEQ ID NO: 36150 - DNA, 260 bp, Unknown
  Description of Unknown: RightRegion for integrase B10151 sequence
atcgtccgctccgtcgtgaaatcctgcgcctgggacggggagacgctttttctttcgctctaaacctcacttttttattatgcgttcgctccggccgcataatgaaatagtgaacaaataatgcgccgttttatggttataaaattgttaaacttatagttataaaaaacttgtactttgtggctggcagagctaatatacagacagttaaaggaacggcggaaagcctgaatcaaggaggacaaaatcatgatgaacat

SEQ ID NO: 36151 - DNA, 260 bp, Unknown
  Description of Unknown: RightRegion for integrase B10152 sequence
attgaaaatgatgagcaaactaatcatctgctactaaaaataaaaggtttaattgctgcataaacaaaaatttagacgagccaaaatgagcaggaaggcccttaaaaatattttcatgatagtttatatgtccgcaatcaaaaaaaccctattcaagcgaatagggttttggttacatcaagaagaacagaaccatgaaaaattagtgaatcttaaatgtttgttttcgatttttattttttataaaagaaatgtgcacc

SEQ ID NO: 36152 - DNA, 260 bp, Unknown
  Description of Unknown: RightRegion for integrase B10153 sequence
ctaacccttactatatcaaagaatttcatatcaagccacaatttaccaaagaggtttttataagccggggtctcccggcttatcatttgtacatcgccagcatcgcctgcacttccgccgtatcctcatcgatatcatgtatccattcattgtaggccgcatggattccatggatgtactgcgcagcttcaggcagctcggcaaaatcccgcatatgcttatcaaagatctgacgacccatcatattgaatttcagatgg

SEQ ID NO: 36153 - DNA, 260 bp, Unknown
  Description of Unknown: RightRegion for integrase B10154 sequence
tctggtgtactaatgataacacatccgaacacacaggtgtcaatacatcggattgccatctgaccggatgaaaaaagaccgctggaaagcggcctttttctttttctgaaatgaaaaaacccgccctttcgggcgggaggctttcgccttttttaccgctggccgatccgatccatcagctttttgatgtccatgcgtgtcgcttcatccggtgcctcatccatcattcggcgcagttgatcgttccagtctccggtcct

SEQ ID NO: 36154 - DNA, 260 bp, Unknown
  Description of Unknown: RightRegion for integrase B10155 sequence
aatggtgtaccagacgtgttacatccgaacacgcgggtgacggccttccggatcgccatctgatcggatgaaaaaaagaccaccaatcggtggcctttttctttttgcttagtccagcgggatcagctgatccatcacatcatccggttccttttcccatcctcttgtgatcatttccagttctgcttcagtgatgatcgtttcctccgttgcatcatctccccaaagatccaaatactccggtttgattttgtatttct

SEQ ID NO: 36155 - DNA, 260 bp, Unknown
  Description of Unknown: RightRegion for integrase B10156 sequence
tacgcaccctatttaatagggcaaatcgtgtttgcaatcaatgtaaaacaccgcttcgagtgaggcggtgtttgttttgtaaattataaatatgtagcgttgttatcgtcatcgtctttcggcttttccttgaagaatagtcgtttaacgaaatcgagtaccattgtgccaagagcgttcaaagaagtagttttgaatatattatagaacgtctgattgagagcataaatcgcccctgcaattacaatgaaattatccca

SEQ ID NO: 36156 - DNA, 260 bp, Unknown
  Description of Unknown: RightRegion for integrase B10157 sequence
atcgccagggaggtgatccagtcagccacatgggacggcgagaccctttttattatgctttgatgttctcttttttatcctgagcgcatcgggtagcaggataaaaaagagaaaaggcccaggagcagcgaggagctcctgggcctattattttatttaattattcgatgtagatcttgccgttgaagtaagcggcgagccatccggaaggacagcggatccagatgttcgcgccgactttcttgacctccaggcaagtg

SEQ ID NO: 36157 - DNA, 207 bp, Unknown
  Description of Unknown: RightRegion for integrase B10158 sequence
atcgctcgcgctgtgattcaggagtgtacttgggacggggagcggctttttattacgctctaaacctcactatttcataatggtggggttccggtctcatacgaagagccgtcctgataagatctcttattgtaattggagtaaccccatcggtatttgcatttctggtctcaagccttactatatttttagctcccagaagctgca

SEQ ID NO: 36158 - DNA, 260 bp, Unknown
  Description of Unknown: RightRegion for integrase B10159 sequence
ggtcagccctatgtttgcttaagtgccgagattagccgaaaggatttaagaaaccgggcctaattgccaggggtatggttgtggaaaagtgcttcttgtatatttgactttataagaaggtgagttattatgtggacatggaagaacgattcgaaccgctcgacccgctcaatatcagccagatggacgaattcttcgaagccttggctgctggagacgtcgagtactaaccaagaaggcagagcctacgctctgcctcc

SEQ ID NO: 36159 - DNA, 260 bp, Unknown
  Description of Unknown: RightRegion for integrase B10160 sequence
gctatctctttgatatggaatttctgccccagctcatcgatgaagttttcgataaaaccatagtggacaacattgccctccgtagttttcagatagccctgccgctcccacacatcgtaaggaacatgatcacgccttacacggagaggcaatgtttcctcaggcaaccagaagtaaggcataacgtagtaatgttcatcttcttccgttggcggaaacaccaaaacaaatgctgtaatatccgttgtgctggaaaggtc

SEQ ID NO: 36160 - DNA, 260 bp, Unknown
  Description of Unknown: RightRegion for integrase B10161 sequence
gacggtgcaccatttgttacacatccgaacacgcggatggtcatttacacgatcgccgtgtaaatgaaaaaaagggccccggcacgatgccggggcccttcttattcttcggacagttccctcttgatgtcgtatttcttgaatgtcagttcatacgcccccattgcactcagcgccacgatgaaggcattaaccgccgtcaagatggcgctttgcggcgtcaggcccgtggtaaatgccgtagcgatcagcaggatcac

SEQ ID NO: 36161 - DNA, 260 bp, Unknown; identical to SEQ ID NO: 35632
  Description of Unknown: RightRegion for integrase B10162 sequence

SEQ ID NO: 36162 - DNA, 260 bp, Unknown
  Description of Unknown: RightRegion for integrase B10163 sequence
gtaccggactatgtgactaaggttggacatctgaaacccttttcctcccacgagactcaatagttccatcaggctttacacctcttattctgaagtgctgctcaaattcctcttttgtgattgtgatgggtttgggttcttcgtattggattgtctcggcaagggcaagtgcaatctcggaagcagggaagttcctcaataggtaattcccaagttcttcaattgtgatttctccggtcttagcctgtttgtaaatttgc

SEQ ID NO: 36163 - DNA, 90 bp, Unknown
  Description of Unknown: RightRegion for integrase B10164 sequence
atcgctcgcgctgtgattcaggagtgtacttgggacggggagcggctttttattacgctctaaacctcactatttcataatggtggggtt

SEQ ID NO: 36164 - DNA, 92 bp, Unknown; identical to SEQ ID NO: 35629
  Description of Unknown: RightRegion for integrase B10165 sequence

SEQ ID NO: 36165 - DNA, 260 bp, Unknown
  Description of Unknown: RightRegion for integrase B10166 sequence
tccaacagggacatcaggtttgaactgaaaaacggagaggtaaggacatggcaaagagagtaagacagataccagctacgttgaaccgcttcacttcttcaccggtcttttccacagtgaagaggaaagtcgccggatacgcaagggtatccacgaacaatgaagaacagcagtccagttatgaggcacagatggactactacagatcttatattactagccggagcgactgggagttcgtcgggatgtattctgatgag

SEQ ID NO: 36166 - DNA, 260 bp, Unknown
  Description of Unknown: RightRegion for integrase B10167 sequence
cccggcgcacatctgacccttgaaatctacccccgccagccctccgacgacgatgatttttaatgcaaaataggggtagcatggcgggtgggatgaatcgcgcccaccatgctacccccaaaatgaacgaagcagccccgccgatctggcggggctgctggtgtgtgggcggggttggtgccgtcaagcacccatgcctgcgcgcagcaggcgttcgacgcaggcggtcaggctttcgtcggaggtggcggcaaggtcgc

SEQ ID NO: 36167 - DNA, 260 bp, Unknown
  Description of Unknown: RightRegion for integrase B10168 sequence
tcattggcgatcaaggaggcacttaacggtggaagcaatacagaaacgggtaacgaaaattgagcgagcaacggtcgcgttgggagaaaacaatgttcgcctcctcgcgaaacgacgcgtcgccgcgtatgcgcgggtatcgaccgacagtgacgagcagttcacaagcttcgaagcacaggtcgattattatagccgccagatcgccgctaacccggactggacgatggtcgaggtttatacggacgaaggtatcaccg

SEQ ID NO: 36168 - DNA, 260 bp, Unknown
  Description of Unknown: RightRegion for integrase B10169 sequence
atcgttcgctctgtagtgaagacttgtacatgggacggcgtgaatctttttattacgctttaaacctcacttttttattatgcatccgaccccatgcattataaaaaagtgatgtaatcaaatagcacgtatatttcacaatagcgctacatgtctatactatcagatattacgtgtatttggttctgttcattgcatacattcgcattattaactgaattgtcgcacatatacgcatgttgttaaaaataccccctcaa

SEQ ID NO: 36169 - DNA, 260 bp, Unknown
  Description of Unknown: RightRegion for integrase B10170 sequence
atgaaacaagctgctgccgagcgaacacgcattcaaaggagggaaaaacaatgccaagagtaacgacaataccagcgacaaaaaacaagttcacggcgctaccgacagcgtccattgcaaagcgacgcactgccgggtatgcccgtgtttccacggataaggacgagcagttcaccagttatgaggcacaggtcgattattacaccaagtacattcagtcccgagaggactgggagttcgtcacggtttatacggatgaa

SEQ ID NO: 36170 - DNA, 260 bp, Unknown
  Description of Unknown: RightRegion for integrase B10171 sequence
aaaaccagatccagaaaaaggagtaattctcatggaagccatcaagaaagtcacgaagattgatcgtgcggtcgttggcaaagcatcaacgcatcaagcgattgcaagcctgcgtcgagttgcagcgtatgctcgagtttcgactgacagcgacgaacagttcaccagcttcgaggcgcaggtggattactatacccgccagatcactgctaacccagactggacgatggttgaggtttatacggacgagggtatttccg

SEQ ID NO: 36171 - DNA, 260 bp, Unknown
  Description of Unknown: RightRegion for integrase B10172 sequence
gaggggaatcgaacccctgtccgaaaacccgttcatgaaagtttctcccatcagagtcattaatttgacattccctctgccaagcgcctaatgacaggctcatggttttagtagcttaattaggttcttttactacctcaaagcattggtagaaaagttcctcgcccaatcgttgcccagaccctaagtggcgagttgcctaggaaggacaccgcagcctaagctgcgaaagctaaattatcttcagcgtttaatttaat

SEQ ID NO: 36172 - DNA, 260 bp, Unknown
  Description of Unknown: RightRegion for integrase B10173 sequence
gtctatgatgagatgctggtggtcgagttcaaatccggtctggagatcgaggttgacgcataagaaattaccatttacggcagtcggacaagttccggctgtcttttttgctttaggggatgaaatccggaccgttttctgatacaataaattgaacagatagtgaaactgcattgaacagtatgtaaggcggtaaggtatgcttaagaataacattgaaatagatgtcaaagtaaaatgcgtggaagagcagatcacgc

SEQ ID NO: 36173 - DNA, 260 bp, Unknown
  Description of Unknown: RightRegion for integrase B10174 sequence
tacgcaccctatattgtagggcgaatgtcatttgcaatcaatgtaaaacaccgcttcgagtgaggcggtgtttttctttattagtcagtttttttcttgattttttcaacaatccaatcaagcactttaattgccaaatcctttataggcgtaatcttgaagatattatagaatgtttgatttaacgcccacatagcggcggcgaccgatagtatgtatttcatctcgaattgacctacaattaaaaggtatataatcgt

SEQ ID NO: 36174 - DNA, 260 bp, Unknown
  Description of Unknown: RightRegion for integrase B10175 sequence
cagcgcccccagtcggtattatattgctactcacaacttttggaaaccttatgtattttgtaataaaaaaacgggtgccagtttttcccgatatgaccacacccgttttctctgctttcgcagatatttcaattatatcaccaattcataattcgtcagctatttttcgcataaacctcgatattggcagaccttctttttcagctcttgccgctatcttttcatgtgtgactctatccacgcgaatcatgatgctgtcg

SEQ ID NO: 36175 - DNA, 260 bp, Unknown
  Description of Unknown: RightRegion for integrase B10176 sequence
tgtagtgtaccaatagtaacacatccgaacacagctgtcacgatcttccggatcgcgatctgatcggaaagaaaaaagcaaccatgcggttgctttttttgtactaaaaaaccgccccgaagggcggaaaggatgtgcgcttcctgcacgtccttttttagtttgccatgcgatccataagctttttgatgtccatccgggtcgcttcgtccggtgcctcgtccatcatcatccggagatgctcatgccagtcaattccg

SEQ ID NO: 36176 - DNA, 260 bp, Unknown
  Description of Unknown: RightRegion for integrase B10177 sequence
gacaaaatcgaattcagccgtgaaaatggattagagttcatccttgatgtttatttgaagtgatacaggggcatgatcagaaccgaatatatttgtttcaatcgtgctttctgtaatcatatccgctgcccaatctgataccaggaaataatctattcgccacccggcattcctggcccttgcatttcgcatgtaactccaccaggaatattccaccttatccgggtacagatggcggtaagcatccacgaatccagcac

SEQ ID NO: 36177 - DNA, 260 bp, Unknown
  Description of Unknown: RightRegion for integrase B10178 sequence
gaaaccgtcaccctgattaccggtcaggcgtcgtggattacccgcaaatggctgcccgcctagacctcacttaaatgaaggcgttttacacgttatgttaaactgtctcacaaccaagcggtatgttgaattaccgtgaggttgggtagttcaaaagtgcaaattctccactaagttctctagcttttctgtcgtaggccaatgctgcttccttagcggttgcatacccaccgagggaatagctcttattgtggtagcgt

SEQ ID NO: 36178 - DNA, 260 bp, Unknown
  Description of Unknown: RightRegion for integrase B10179 sequence
tcccagtccgtaccgcggagaatcgaactctgtgcagggcgcgggcgtaaagaaaacgcgtgagcgtttttagcccgcgggcgaggacgccggcaggcggccgaagccggtgcggatttgcgaagcaaagacgcggattctccgcgcaaagcctcaaccctatatagatgcgatgtcgatcccgcgtctgctcccgatcccagcccgtcaacggatcctccaaaaccgcggagaatcgaactctgtgcagggcgcgggcg

SEQ ID NO: 36179 - DNA, 260 bp, Unknown
  Description of Unknown: RightRegion for integrase B10180 sequence
gaacgcatctatttcagccgggagaacaacgctgaattcttcttagacatccagacgaagtaacacagggcaatgatctgacccctgaatgtccgttaggatgtcagcttcgacaatcttgtccttcgcatcctctgatgcaaggaaatagtcaatgcgccagcccacgttcttttcacgcgctttgaacatgtacgaccaccacgaatacttcacttcgtccgggtgaagcgttctgaacgtgtcaacgaagccagcgt

SEQ ID NO: 36180 - DNA, 260 bp, Unknown
  Description of Unknown: RightRegion for integrase B10181 sequence
gtttgggatgaccatttcaccatcgaattgaaatccggtgttagtatcgatattgatgcataagtcccatagatgcacgaaaccctctcgaccatgatggccgggagggttcttttgctacttgttttcttttacaacaaaatctacagcgtttttctttatttcttcattatatcgacgcaccgcatcttcagtaatatgtgttatataaaacttgtcatctgaatccgtattctttccctgagccattagaactctag

SEQ ID NO: 36181 - DNA, 260 bp, Unknown
  Description of Unknown: RightRegion for integrase B10182 sequence
gaaaccttcactttcaatatgaagtgtgggctcaaattaacagaaagggtggtgttagaatgacgcacgttccatacggatacaaaattgaagctggggttgcaaccttcaatgatgatgctccggcgatcagaaagctttttactaacttcattgagtgtaaatcaatgagagctgcggcaaaaacagccgggataaataaaacgcattcagtaatcggcaggatcataaagaatgagatttatcttggaaccgacttc

SEQ ID NO: 36182 - DNA, 260 bp, Unknown
  Description of Unknown: RightRegion for integrase B10183 sequence
atcgtccggaaggtgttccgggtctgcacgtgggacggcgagaccctgcggctcgggatttaatttttgttccgaatctcactttaatattatgcgttcttcaggtcgcacgataataaagtgacttaaagtgacttagcctctctgacgccacagaaggcgttataaggggcttttcattttaggcgaacacttgctcgaaaagcgcgtaaacgtctgaatctgccaaagctgtgaagcgacgcggaggttataagcgc

SEQ ID NO: 36183 - DNA, 260 bp, Unknown
  Description of Unknown: RightRegion for integrase B10184 sequence
agaaacgaaatcaagtttgtaatgaaatgtggtctaacattcacagaaaggattggtgattagatgggccatacaccctttggctatcggattgaaaatggcatcgcaatcatagacgaacctgctgccgcaaaactccgacagctttataaaaattatctgagtggcatgtcattatcaaaggcagctgctgaagctgggataccaacctatcatggaacagcaaagcgattgatgggaactgtccattatcttggcga

SEQ ID NO: 36184 - DNA, 60 bp, Unknown
  Description of Unknown: RightRegion for integrase B10185 sequence
gcaataaaaaacacattcgatgtgttcgaatgtgttttaaatggtgggcgatacgtgact

SEQ ID NO: 36185 - DNA, 260 bp, Unknown
  Description of Unknown: RightRegion for integrase B10186 sequence
tatccgaaccaccgaatcacaatctacgtgatcccgttggaaccggataaaaaaagagcctgaggcatttgccccaggcttttttcattcctccgcgggaggtttctcatcatcgtctttttgattctcgctggccgcttccgctgccggcgttttgttctgcgctgccgttgttccttcgcctttgctgcgcatgatttcaagcgcctgcagcaggatcttcgggataggcacacccatggccgtcacgttttccagta

SEQ ID NO: 36186 - DNA, 61 bp, Unknown
  Description of Unknown: RightRegion for integrase B10187 sequence
cccccggaagatgacgatataacgtcaaattccgagggttctaccgcgttgcggttggtgg

SEQ ID NO: 36187 - DNA, 260 bp, Unknown
  Description of Unknown: RightRegion for integrase B10188 sequence
agaaatgaaatcaagtttgcgatgaaatgcggtctgacattcacagaaaggattggtgattaaatgggccacacaccctttggttacaaaatagataatggtattgccgttatcgatcaaccggctgctgacaagctcagacagctttacaaaaattatctgagtggtatgtccttatcgaaggctgcatctgctgccggaattaaaacttatcacggcactgctaaacgattgatggaaacagcccattatcttggcga

SEQ ID NO: 36188 - DNA, 62 bp, Unknown; identical to SEQ ID NO: 35746
  Description of Unknown: RightRegion for integrase B10189 sequence

SEQ ID NO: 36189 - DNA, 129 bp, Unknown
  Description of Unknown: RightRegion for integrase B10190 sequence
tcaggtgtccttttttggtgcgtaattagaggggacttgaaccctatgagggtttttgcgtgaaaaaatatgccggtggcatgttttttagcaaaaaggtgcgcagtcgggtaccgaagccacaggctt

SEQ ID NO: 36190 - DNA, 260 bp, Unknown
  Description of Unknown: RightRegion for integrase B10191 sequence
ggaagcatcgcatttataatcgactttgtaatcagccgcccggcctcgcgccggagcgcataagaaaaagcctcgggaaattcccgaggctttttcttatttcgctatggccacaccgacggcaaccgcgaaaagcgcttcccagatgttccgctgcgtccgcagccgtccttcgattttatcgcgttccttctctgatttccgaaatgatgccctggcattctgtaactcggcgttggctgtcctcaatgattcgtcga

SEQ ID NO: 36191 - DNA, 118 bp, Unknown
  Description of Unknown: RightRegion for integrase B10192 sequence
atcgaacactttcccgatattttaactcacctggaccgcttactggccatctttgccgcttaaaaactacaaaccccatctttcgacgggggcctgtagtaagtatggaaatgctaag

SEQ ID NO: 36192 - DNA, 61 bp, Unknown
  Description of Unknown: RightRegion for integrase B10193 sequence
catccgaaacccaacccagcactaattcgcaagtttgtcagcaaaattgtaccagatggaa

SEQ ID NO: 36193 - DNA, 260 bp, Unknown
  Description of Unknown: RightRegion for integrase B10194 sequence
cattccagaaacgatatccggtttgaactgaaatgcggcctgacgctcagggaaaggaagtgaggatatgggacatacaccatacggatacagaattgagagcggttgcgctgtgattaacgaagaagaagccgctaaaatcaggaacctatacgagaattacatcgccggaatggcacagtcaaaagctgccatcgaggcaggcatcgagacctaccacagctcagccaagcgcctaatgcaaaacaggcactaccttg

SEQ ID NO: 36194 - DNA, 260 bp, Unknown
  Description of Unknown: RightRegion for integrase B10195 sequence
cgcactgagctcggatttgagttcacttgcgggcttgtttttcgagaggaagtgaaccgatgagaagcataccatacgggtacaaggtgatgaacggcagggcagtcatcgaccaggtagagggaaagaaggtgagagatgcttttcagatgtatgctgctggaagctcccttgctgggatcaaacaggccctggagatcaaccgttaccatgccggcatcgacaacattctgaaggatcgaaaatacctgggcacagaa

SEQ ID NO: 36195 - DNA, 260 bp, Unknown
  Description of Unknown: RightRegion for integrase B10196 sequence
agaacggaaatcggattcgaactaaaatgcggaattactctaaaagaaaggttggtgagataaatgagccatataccatttggctaccgtattgaaaacggaaaagccgtaattgataaagaggctgcagaacagataaaaacattgttccaatcttacctgagcggcgattccttggcgacagcagctaagaaagcaggtattaaagctttccattccggtatcggcagaatgctacgaaatacccgatacatcggtga

SEQ ID NO: 36196 - DNA, 260 bp, Unknown
  Description of Unknown: RightRegion for integrase B10197 sequence
cgaacggaaattggattcgaattaaaatgcggaatcacacttaaagaaaggctggtgagataaatgagtcatacaccattcggctaccggattgaaaatggaaaagccgtaattgataaagaggctgcagagcagataaaaacattgttccaatcttacctgagcggcgattccttggcaacagcagctaagaaagcaggtattaaagctttccattcaggtatcggcaggatgctacgaaatacccgatacctcggtga

SEQ ID NO: 36197 - DNA, 260 bp, Unknown
  Description of Unknown: RightRegion for integrase B10198 sequence
gccattgatacaaagggcaagtatcacgtcaccgaaggaggatacgtgggcaaggcggaatgaccccgccgcacagattcagttctctttgtcagggcgtatcaaacttgaccgcacgtcccccgcattggacaccacactgccagtgcggtcaaaggtcttgttcagtttcgggttgtagtgcccaagaagggagttggaagcggagcggatttccttccgatattcgctcacgtcgttttcataaccaatcacgctgc

SEQ ID NO: 36198 - DNA, 260 bp, Unknown
  Description of Unknown: RightRegion for integrase B10199 sequence
gaaaataggagagtattaaaatgggaaaagttagagtcataccatcaaccatcaatccactaacacagcaaagtatccattcgtctgaaagaagaaaggttgcagcttatgctcgtgtttcaacggactccgatgagcagtatagttcttatgaagcacaggttaagtactacaaagatttcattcaagatagagttgactgggattatgtgaacgtctatgcggatgagggcatatcaggaactagtactaaacgcaga

SEQ ID NO: 36199 - DNA, 260 bp, Unknown
  Description of Unknown: RightRegion for integrase B10200 sequence
gccgcgccaaggcgatcggcgctgtggctggcctacggcgtgtcggcattatcgcctgtctgatcctggccatcgacccgcgtactgttactgcggacggcatcgcccatgcgatccatctcatctacgtcgagccgactggcgccatcttcacacccgctgagcaggccgctgcgcgatcgggcatcgccggcgccgtcgccttctggcaggatctggcgccgacccccgtgccgctgatgatcgccgacgagcggatg

SEQ ID NO: 36200 - DNA, 260 bp, Unknown
  Description of Unknown: RightRegion for integrase B10201 sequence
caggaggaaattggtttcaaaatgaaatgcgggttgaacttaagggaaatgctggtgaaataatgagcaatataccttttggatataccattcaaaacggcagggctgtcgttaatgaagaggaagcagttaagattgagaaactatttgaggcttatctttccgggctttctttaaccgaagcagcccaaaaagcaggtattaagcgttaccacacatctgttgcaagaatgctttcagataaacggtatgttgaggac

SEQ ID NO: 36201 - DNA, 260 bp, Unknown
  Description of Unknown: RightRegion for integrase B10202 sequence
tgtgccccaggcgggaacttactcgaacacctgctatcattggccaatgtttttgcagcataaacccccacccagcccccagtttcctccgaggaaactaaaaagtactcaaaaagggtacttttgctacgaagagatacgtagtctattaacaactgtttacgaaacattacgtaatacactaacgccagtttacgaaaagatacgtagcaggctttttaaataattactcaccgctcccaacttccgcccttccattt

SEQ ID NO: 36202 - DNA, 260 bp, Unknown
  Description of Unknown: RightRegion for integrase B10203 sequence
gtcccgttcgacccagcatccatccggatcgagtgggtcgccacgcgaggcgcacgtaagtagacgctcaaattaatcgatcccaccgacgatgccgttgccttttcggcaacggcatcgctatatcttccccgctcttgcggccgggtcctgttacggtgacgaaaagatggccattacggaggtcttgtcaggtgacgttacatggacacaggagatacagaggcacaggcccagccagcaggcgcagatatcgatga

SEQ ID NO: 36203 - DNA, 260 bp, Unknown
  Description of Unknown: RightRegion for integrase B10204 sequence
ttgggcgagtgcccccggcggtctccactccatagtctaaacttcgactttgtcctcacctgagtcggcctgctttgcccttgcctccgccacctggcgcaccaggttatcacgcacggcagcaagaacattgataaccacctccgccgggacctgaccgccgccgatgacctggagagcgctctctccggaaagcgggtcatggctgaccgccaggtggatgaccgggttctgcgtccgcacaatcagctgctcaacgc

SEQ ID NO: 36204 - DNA, 62 bp, Unknown
  Description of Unknown: RightRegion for integrase B10205 sequence
cgggaggtagttgggtttgtattaaaatgtggaatcacactgaaagaaaggttggtgaatta

SEQ ID NO: 36205 - DNA, 260 bp, Unknown
  Description of Unknown: RightRegion for integrase B10206 sequence
ttcgtgagccagccgggcttcacgtcgcggcccacgatccgccggccgccggtggagggctagttgccgctctcggcggcctggtccggttgggccggtggccggtggtcgtcgaggcggatgagcttggggtccgccagggcgaggaacatgccgtcgacctccccggcgcgttcggcgaggacgccgtccttgaactggctgatcatgagcctgccgcgttcgtcttcgccttcgcggcggacggctgcgatctcggc

SEQ ID NO: 36206 - DNA, 260 bp, Unknown
  Description of Unknown: RightRegion for integrase B10207 sequence
agaaatgaagtccgttttattctaaaatgtgggcttacattcacagaaaggatgggcgattaaatgggccatacaccatttggctatcggattgagaacggcattgcggttgtcgatgaacctgctgccgccaaaatccgacagctttatcaaaattatctggatgggctttccttatccaaagccgctgcagaagctggaatcaaaacctaccacggcacggccaagcgcctgatggaaaatgaacactatctgggaga

SEQ ID NO: 36207 - DNA, 260 bp, Unknown
  Description of Unknown: RightRegion for integrase B10208 sequence
acggtcgagatgaaagctactgcccgtcaaaaagccctggaaaggaggaaccagaatgcctaaagttacaatgatacctgcaaccataaacccactgacacatctgccttcggtggcagcacggaaaagacgtgtcgccggatacgcccgtgtttccactgacagcgatgagcagttcaccagttatgaagcccaggttgattactacacaaaattcatacagtccaagccggaatgggagttcgtaaaagtctatacgg

SEQ ID NO: 36208 - DNA, 260 bp, Unknown
  Description of Unknown: RightRegion for integrase B10209 sequence
attaaagtaaatagaatatatgatatgattatgaaaatgaataaaaattctaaaaataaataagataataagatcattagattatattattttattattaattataaatgtataatttgtctgtattagcaatgtttaaaaatgaaagttggattataaaagaatggatagaacattatttattagaaggtgttgaacatttttatttaatagataatggttcaactgataattatgaagatataataaaaatatataat

SEQ ID NO: 36209 - DNA, 260 bp, Unknown
  Description of Unknown: RightRegion for integrase B10210 sequence
ttcgacaccttggagatcctgtctgaactggcacgccgcagtgagtttaggagggtcgcatgacagctatcgagacccatcgcagagcgctgatgcacatcgccgaagagacgaacattcagctcattcccattgaagaaattcgggtgcttaatccacgggcacgtaacaagcaagtgttcgccaggttggttgagaatatatcggcgttaggcctcaagcggccgattacggtcgcccctacgatgggcggcaccgaa

SEQ ID NO: 36210 - DNA, 260 bp, Unknown
  Description of Unknown: RightRegion for integrase B10211 sequence
aaggttaatcccttagagggaaggaactatgtccttgaagtaagaaaggagcattttctatgaaaaaggttattaccatagaagccacaccaactcgtgtttctagtaatgacgacagtacaccggctaaaaaacgacgtgtagcgggctatgctcgagtatcaaccgaccatgaagaccaaacgaccagttatgaatcacaaatgcgatactatacagagtacatttcaagtcggagtgattgggagtttgttaaaatg

SEQ ID NO: 36211 - DNA, 260 bp, Unknown
  Description of Unknown: RightRegion for integrase B10212 sequence
gacgtagttcaaacgcacgcaaggggagctgaaccggctgccaggctggtaggagtagcgtagccccagatgagggggcagcgtgagggaagaaacagcaggccccggcaagggccgggtgagacaggcagtcccagaaacactccaggtgcgcaagccgttttctggcctcttcccctggtcgcaggcagtagccgatgcgatcagggaagacatggcggcaaacggctatgatcccgccttcccaattgtggtttggg

SEQ ID NO: 36212 - DNA, 260 bp, Unknown
  Description of Unknown: RightRegion for integrase B10213 sequence
tctgccccgtccctgtttgacatcatgatcataaatttgtgcaaattacgcaaagccgcttaaaatcacgatttctgggcattatcctaaattttacgcacgattgagcccctccggtggagcatccccacgaaaaagtttttcgcgggaggggggatacccacccgggcgggggctggcgggaatccgtacgctatattctgttcacgctccgctaagggttccctatgcggcggagcagggcgttcgatctcgcgcag

SEQ ID NO: 36213 - DNA, 260 bp, Unknown
  Description of Unknown: RightRegion for integrase B10214 sequence
tcttggagtggtagcgggggtgcgctacttctccgagagaaggcggtccgcctcgccgcgtagggtactgcactcgggcgtccgctaggcggtcgtcggtcgaatcgttccgaatcggtatcagttagggctttacaccctcgggcgtattgccctaacctttccacatccccggcgcggtgccgggctaaccgaaggaaccgaaaatgaacagcacccctagcgattacacgtgccgcgtcgtcagcgaaaacggcaaa

SEQ ID NO: 36214 - DNA, 61 bp, Unknown
  Description of Unknown: RightRegion for integrase B10215 sequence
gagcaatcctgcgagttagaggagtatgacgagcaattagtaaggtggcttattgaaaggg

SEQ ID NO: 36215 - DNA, 62 bp, Unknown
  Description of Unknown: RightRegion for integrase B10216 sequence
tacatcacggtttatgagaacggagaaaaaacagttactttcagagatggaagtgtgatata

SEQ ID NO: 36216 - DNA, 62 bp, Unknown; identical to SEQ ID NO: 36215
  Description of Unknown: RightRegion for integrase B10217 sequence

SEQ ID NO: 36217 - DNA, 260 bp, Unknown
  Description of Unknown: RightRegion for integrase B10218 sequence
tcttggagtggtagcgggggcgcgctatgtcaccgagaaatcgccctccgcctgtccgcctagtctactgccggcgcccgtccgcggtgtggtcgcggtagaagatacctccgaaatggaatcagtagggctttaagccctcgggtttaatgccctactcttgcaccatacccggcgcggcgccgggcgaaccgaaggagaatcgacgatgcgtaagtaccacctcaagagcagcaagcaccacggcccgtcctgccagt

SEQ ID NO: 36218 - DNA, 260 bp, Unknown; identical to SEQ ID NO: 36181
  Description of Unknown: RightRegion for integrase B10219 sequence

SEQ ID NO: 36219 - DNA, 260 bp, Unknown
  Description of Unknown: RightRegion for integrase B10220 sequence
acgatatgcaaagacggcggtatggttttcctgtttaaggacgggagtaaaattacagtataaaatgagttaggggtgcgaaatgcaccccttatttttatgcaaagaaacggggaaaaacaccaaagaaacggcaattgaggaaagaaacggcatttctccaaagaaacggtgaaagaccaacgaaacggtaaaatgcaacccccaccccctccgtttctttgtactttcattttgtttctttgctctcttatttttct

SEQ ID NO: 36220 - DNA, 260 bp, Unknown
  Description of Unknown: RightRegion for integrase B10221 sequence
acgaacatgcgtttgtttatgtattcagattacttctctgtccgtattcgacgcattgcttaattactggtctgcaggtatcattttagacaacagtttatcgaccatccacagtacaacagaaattaaagtaggaaggaatgcggaatcacgaaacttattccaaccagtctctttttcagcatccgcttttagtgctgtagtataagaatcagctatctcctttactgcaggaagtgcagtatcttttaaccaggcaa

SEQ ID NO: 36221 - DNA, 260 bp, Unknown; identical to SEQ ID NO: 35549
  Description of Unknown: RightRegion for integrase B10222 sequence

SEQ ID NO: 36222 - DNA, 260 bp, Unknown
  Description of Unknown: RightRegion for integrase B10223 sequence
tacagccgaaaatcaatcggatttgtacttcactgcggtcttacttttaaggagagaatttaatgggacacacgccttatggatatcgaattgtggatggaagagcggttattgatgaagctgctgccacacagattcgtgagctttacaaaaattatttaagcggactttcacttaccaatgctgcaaaggaagccgggcttgacctacttcattccggtgctaaaagaatgatgcgaaacaagcactaccttggtgat

SEQ ID NO: 36223 - DNA, 260 bp, Unknown
  Description of Unknown: RightRegion for integrase B10224 sequence
cgaaccatgaatgttcgccgatccatactcattatcgacagcataaaaaaagaccggacgtgagtccggttcttttcatttaatgagatagtccttcgcgacttcgtatgcgtctccatcgacgacaccattctcgtaaccgtaatacgtccagcgttcgtgtcgcgaatctgtcagagtgacatggatcagcgcgacttcgaatctctccagtttgctcttctccttctctgtcagatgcttccacatcatgtcagcct

SEQ ID NO: 36224 - DNA, 260 bp, Unknown
  Description of Unknown: RightRegion for integrase B10225 sequence
gtactgattgtaacacatccgaacctcaggatcataatttacacgatcccgctggccggataaacaaaaaaaaccgccggaaaagctccgacggttttttcattattcatctattatgtcaggcggttttgcttcctttgttttctccacttccgggatgcctgccagactcgtcagaatcgacaggacacaggccacaccactcacagagagtgcacggagccagtccacttccgatgctgctgccccaactgcaatgc

SEQ ID NO: 36225 - DNA, 260 bp, Unknown
  Description of Unknown: RightRegion for integrase B10226 sequence
cgaactcagatgattcgtcgttccatactcatcattgagaccataaaaaaagaccggacgtgagtccggttcttttcatttactgagatagtccttcgcgacttcgtatgcgtctccatcgacgacaccattctcgtaaccgtaatacgtccagcgttcgtgtcgtgaatctgtcagagtgacatggatcagcgcgacttcgaatctctccagcttgctcttctccctgtctgtcagatgcttccacatcatgtcagcct

SEQ ID NO: 36226 - DNA, 260 bp, Unknown
  Description of Unknown: RightRegion for integrase B10227 sequence
tattcacgacaaaaaataggatttgttctgagatgtgatcttacatttgaggagatgatttaatgggacacacgccatttggatatataatcgttgacggaaaggctgttgttgacgaaggcactgccgaacaggttcgcaatgtctatttgaattaccttagcggactttctcttgtcaatgcggcaaagagggcaggacttaatatgcgacattgcggagtgaagaatatgctgcaaaacaagcactatcttggcgat

SEQ ID NO: 36227 - DNA, 260 bp, Unknown; identical to SEQ ID NO: 36183
  Description of Unknown: RightRegion for integrase B10228 sequence

SEQ ID NO: 36228 - DNA, 260 bp, Unknown; identical to SEQ ID NO: 36187
  Description of Unknown: RightRegion for integrase B10229 sequence

SEQ ID NO: 36229 - DNA, 260 bp, Unknown
  Description of Unknown: RightRegion for integrase B10230 sequence
aatgagatcgtcttccagctaaagtgcggactgcgtctgacagaaaggatcggtgagatatgagcagaggacacacaccttacgggtatcggattgaagatggctccgcggtcatttgcagggagcaggcagagcagatccggaagatctacgagggctacctcagtggactttcactaagaaacgctgccaaagaagcggggatgcatgcaacgcacacctccgtcagaaggctcctgcagaattcgcacctcctgggt

SEQ ID NO: 36230 - DNA, 260 bp, Unknown; identical to SEQ ID NO: 36229
  Description of Unknown: RightRegion for integrase B10231 sequence

SEQ ID NO: 36231 - DNA, 260 bp, Unknown
  Description of Unknown: RightRegion for integrase B10232 sequence
tgcgaggtggggctcgaactaaagtgcggtttgattcttagagaaagagtggtggaagaatgagtcacgtaccttttggatataagatagagaatggcaaagcaaaaattgacgaggtcacttccgcgcaggtccgaaaaatctttcaattctacttggagggtgattctctccttacaattgcaaaaaagactggggctaaagcatcacacccgggtattggcaagattctttgcaatagaagatatcttggggacggc

SEQ ID NO: 36232 - DNA, 260 bp, Unknown
  Description of Unknown: RightRegion for integrase B10233 sequence
cttcgttttcgtctgtacaggcacgtcgtcatttttacggttgatttactccataccgtgtaactcacctctcccggtggtcgctttgttgcgccgccgggttttgttttctccgatataaaaaagataaaaataccacggattgcgtagttttttattgacaatccacgaaatccgtggtatattattattaagaaatgaagagaacaaaaaacaagcaggagggtaataaaatgacagcgaaagaaatccttgaaatc

SEQ ID NO: 36233 - DNA, 260 bp, Unknown
  Description of Unknown: RightRegion for integrase B10234 sequence
agtaaactcaaactgccgattgtcgaacggtcctggcctagatggatattcgacgcggcgtaaaaataagccaccctgatttaatcagggtggcattttgcgttttatgcaaattactatagggatttcaccagcatggccgccgtgacaacttgccacagtgttcgttccagtttcaagcgtcgttcagtccgtgcgtgttccttttcggatttctcgtaggatttctgtgcttgattcaatgagttttgcgctatctc

SEQ ID NO: 36234 - DNA, 260 bp, Unknown
  Description of Unknown: RightRegion for integrase B10235 sequence
agaatatttataaaacaggttatagtcacccgtggcagtataacacttgaaagatacttttagtattttgattactagtgcatctgcaatggttaccaaaatgcctaaagttttattttccttccattataaatatgggttattcatgtgaccgatatctcaataggtattatggattaaataaaaaaacaattaaactccttttttatctgaaaatatttctactaatactccaataaaacatatccctatgaatattc

SEQ ID NO: 36235 - DNA, 260 bp, Unknown
  Description of Unknown: RightRegion for integrase B10236 sequence
gtacacgggcgccgcctgttactcgttcgaacaataaaaaagcccgccatgctgatgggataacacgacggactcggccgcacgattgcgaccccgaaataataaggcaataacagtataacaaaaaagcgcccggctgagtgtgaccgggcgttcttcatttccgggcggaggattgttcccggaatggatttataaaaaatttccatctttcatgcactcacgataaacgcgctctatattctcaatagccagcgcgg

SEQ ID NO: 36236 - DNA, 260 bp, Unknown
  Description of Unknown: RightRegion for integrase B10237 sequence
acgggatgcaaaccggtactggtggaaatcccacggggttccccggcgaatgtactgcgctaggatggtgccgtgccctacaagaacggcaagccgacgcccagccagttcaagcccgggaaccgggccgggaaggggtcgccgcgcccgcctggccgcaaggctggcctgacgccccagatggagcgcttcgcccgcgagtacgtcgtggacctggatgtcggggcggcggtgctgcgggctggctactcggccaagga

SEQ ID NO: 36237 - DNA, 105 bp, Unknown
  Description of Unknown: RightRegion for integrase B10238 sequence
agcgatccaaacctatttgacattgtgatcggaatattgtgcaacatgcgcatagcagcgtaaaatcccaatttctgggcattatccaaaattattcaaacgatt

SEQ ID NO: 36238 - DNA, 62 bp, Unknown
  Description of Unknown: RightRegion for integrase B10239 sequence
gatattaaagagggcaagaaaatcagcctcaccttcaaaaatggtgttcggattgatttata

SEQ ID NO: 36239 - DNA, 260 bp, Unknown
  Description of Unknown: RightRegion for integrase B10240 sequence
agcggaacgcgggacggctgggatgtcaagccgatgaatctgcaaatagaacttaatctctgatagacatcatgtcgggatagacgaatacaaaccaagatgatatacatagacaaagagaaccggcagagcgcttgccctgccggttgcttttattcctgaccgagtgcgtggatagccttctgaatcgcgtgctgcgcttcgggagaaacgtctcccatcatgccttccatttcaccgatcagcttgtccttcgcttc

SEQ ID NO: 36240 - DNA, 260 bp, Unknown
  Description of Unknown: RightRegion for integrase B10241 sequence
aagtcgtttattgaatcagtgctggtgtatgaggatggaagcatggacattcgttttttgtagtctttgtcgtactaactatgcaccgcctgtcggtactgctttgttagtacaatcaatatcttgtgattatccacacagttatcccctatatgtggacaaaataaaagcaaggcggcgcgttgtccgtcttgcttctcttttactccaaaattatcgacattattcttcgatgtattcaaccagcttcggatcgccac

SEQ ID NO: 36241 - DNA, 260 bp, Unknown
  Description of Unknown: RightRegion for integrase B10242 sequence
agggaagaaatcgtctttgaattaaagtgcggactgaaattaaaggaaaggctggtgggataatggcacatataccctacggatacaaaattgtgaatggaaaagcagaagtcgatgaaaaacaggcggaagcagtcagaaagctgtttgacggttacattgcaggacttggattaaagactgcatcagagaatgcgggtcttgatatttttcatggcagtgcaggcagaatgttaagaaacaagcattatcttggggac

SEQ ID NO: 36242 - DNA, 258 bp, Unknown
  Description of Unknown: RightRegion for integrase B10243 sequence
ccagacgtactttattgtatgtctggcttttttaatgaaataaagtcattttttaataattgaactttcagttattaaacgctccaaaaaaatatttttagtcaaagtctacggttcgtagacttttcttttatcttgtggtaaaatggtaaaaaataagtaggtttacttttcttctcgaattgtttacaattaaattaatgataaggaggaattatgagcaccataggaaagagaattgcaaaacaaagaaaaaag

SEQ ID NO: 36243 - DNA, 260 bp, Unknown
  Description of Unknown: RightRegion for integrase B10244 sequence
tacaataaaaaagaaataccaacctttgaaataacgttatatcctaagtttccaagtgtttaaaaacgaatgataacgtggtggaacgtaagaatgtgttccacgacgttatcatttgataacgtcgttttctttttttcgctctatatctttctttacgacattcactacataattatttgcagacctattttcagattctgcagctttctgaatatccccctccatttctattggaaaataaattaactttttaaaat

SEQ ID NO: 36244 - DNA, 260 bp, Unknown
  Description of Unknown: RightRegion for integrase B10245 sequence
agtgataagggtactggaggcgagccactcctaaccctatcactgtccattttaagaccttaattcacaatattagccatgtttaaaatcaatttgcgaacatactcacctttacacgtttttccgtcctgcgcatttaacaaccaatactccggagaacttactacctgcttttcacgcagcaccttgagagcggccataagctttttgtctcctaaattgatatccgataacacagcacacatcggaaagaacttacc

SEQ ID NO: 36245 - DNA, 260 bp, Unknown
  Description of Unknown: RightRegion for integrase B10246 sequence
aaagatattaactccgaaaatattgttttatttaaaaatattaaaaagttgttggttgcataactacaccccctatattttttcttgcgttttatacaaatcttggagctgcggtcgggagcggtttggagtaaaaatttttatggggggagtgtcggatatgtagcctgtcagaaaagagctttaaatataaaaattccttgttttctattaaaaaacaaggaagaaaaggggttcttatgatgaaaaatacactattt

SEQ ID NO: 36246 - DNA, 260 bp, Unknown
  Description of Unknown: RightRegion for integrase B10247 sequence
gtttacgagagctatttcacagtagagttcaagtctggtgcaagtgtagacatctataaataaggataattaggtttcacctcgcttcggcggggtgttttgttgttgtagatatattgacttagctgttataatgtatctattaaggataattttgtacaccctattgaaaggtcaattctatgataacgaataatattgaagtggatgtaaaagtgaaatgcattgaggcgggaaagacgcaggtgcagctcgctgaa

SEQ ID NO: 36247 - DNA, 260 bp, Unknown
  Description of Unknown: RightRegion for integrase B10248 sequence
aaagaaagttcgaccgagaagcgtttggtccgagtggcgagaatcgaactcacggcctcttgaaccccattgtgcttctctcgaaaacacaatgtacaatccgatactgcctagactcagtatcgttaaatttcaaatatattatatcattctgtttcattggatgtcaagacgtttcattccttttgtggtcaaattgtggtcaaacgaccccgacaaatgacttttctcccccagctaagttacatcgcgcaatttcg

SEQ ID NO: 36248 - DNA, 260 bp, Unknown
  Description of Unknown: RightRegion for integrase B10249 sequence
aattatcatctggatatccacttccgcatcacggcgcaacagtatttgggaaaagcatcgtgagggagtcaatatcatttgcaccataatatgcgctgcttgacgatgatcgctttgcgtcggagccgcatttcgccaacgaggaaaaaacgctcgctctgcctacgggtctccaagctgggcattccactcatatctccttctctcttgcttttcaccgtgcttttcgtcaatgtgcaggcctcattgatgactcggac

SEQ ID NO: 36249 - DNA, 260 bp, Unknown
  Description of Unknown: RightRegion for integrase B10250 sequence
cacgtttattcggatccaaatgcttttgaattggatgtgtatccgctgctgaaaaaggaatgatttttcttttgccctgtgagggtatcttgtaacgttgtacacatacaccgatatatgataccttcgtaaaaaccccgccttttggcggggcctttttatgttgtggacaatgtttacttttcagcaatgtactcatagtacattgctgttttgtttggcacggcgtctctgtcctccatccacgccttggccatcat

SEQ ID NO: 36250 - DNA, 61 bp, Unknown
  Description of Unknown: RightRegion for integrase B10251 sequence
gacgaagagaaagaccggcacgttctgcggcaggtcatatctgcccgtcgccgcggcgatg

SEQ ID NO: 36251 - DNA, 61 bp, Unknown
  Description of Unknown: RightRegion for integrase B10252 sequence
ctgtttgattgtctggtggtcaattctatggatgatgtaagatttatcctgaaggatggca

SEQ ID NO: 36252 - DNA, 149 bp, Unknown
  Description of Unknown: RightRegion for integrase B10253 sequence
actcgaacacaatggacatatggcaggtccgtgttcgttgaatacgttataacaaaaaaatagacctctcagatttggcctttccgggccgttctggaggtctttttctttttgcagttcattgttcatcgtgaaataaaaaagcgctc

SEQ ID NO: 36253 - DNA, 260 bp, Unknown
  Description of Unknown: RightRegion for integrase B10254 sequence
aaggattatgaactggaggtattccctaggataccgaagcaccccgacttaacagaagaataaccgcagtgacgtatgcggctattcatagcacgttttatcactgcggttatctttctacctattacattgattccatctttgcgatgaactttctgtactctgctttggttctctcgtccggggcagactccatcatatctctcagagagtcgagcattgcctcgtccccggagtatcttctagagtatctgcccatc

SEQ ID NO: 36254 - DNA, 260 bp, Unknown
  Description of Unknown: RightRegion for integrase B10255 sequence
cataatccgaacactatttatactaaacattttatagtgttggattatacatttactcaatgagcttaaggcggcttccatttgagagagagttgactcaattaaacctaaaaaagcaaggaattatccttgccttttttagtatccacaatattttagtaaagcttctttctctgctctagtcatattaagcctttgaatataaatcttaacttttgattttccaactgcgtttttgtagccaagatagcccataacca

SEQ ID NO: 36255 - DNA, 260 bp, Unknown
  Description of Unknown: RightRegion for integrase B10256 sequence
gggtatttggtactgttattttcggacagtatcggatactctcgcctttatttttgttgctgatatgattcttcaaattgatttggggtttgctgtttaagacattcatgcggtcggtaatcgttataaaaatcaatatattctgatagactttcctctaattcggagacagtttcataaaaatgaaatttgaactgttcttttttaagcgaagcaaagaaagattccgccacagcattatcaagtggattgcctatatt

SEQ ID NO: 36256 - DNA, 260 bp, Unknown
  Description of Unknown: RightRegion for integrase B10257 sequence
atcgtaagatcaatcgtgaaagagtgtacttgggacggggaaacgctttttattttgctttgaaactcgtttttttataatgcgtggctctgccctcattataaaaatgtgaaattgaaaaagccggaagaaatgaattgcacttttgggtcctgaaaagtgcatctcgttttgtccggggcgtgaaatgaatcctctttctgaaatgaatagaacttttgcaaagaaaaaaggcgggaagctccgaagaactcccgcct

SEQ ID NO: 36257 - DNA, 62 bp, Unknown
  Description of Unknown: RightRegion for integrase B10258 sequence
aaaaaagaatggacaaagaaagaccactttgaaatcgaaatcattccgcggttcccggtata

SEQ ID NO: 36258 - DNA, 61 bp, Unknown; identical to SEQ ID NO: 36251
  Description of Unknown: RightRegion for integrase B10259 sequence

SEQ ID NO: 36259 - DNA, 260 bp, Unknown; identical to SEQ ID NO: 36195
  Description of Unknown: RightRegion for integrase B10260 sequence

SEQ ID NO: 36260 - DNA, 260 bp, Unknown; identical to SEQ ID NO: 36196
  Description of Unknown: RightRegion for integrase B10261 sequence

SEQ ID NO: 36261 - DNA, 260 bp, Unknown
  Description of Unknown: RightRegion for integrase B10262 sequence
aggcgcaagcttccacctgagcagcacgtgaaggttgagtgggtgggcgtgtttgctgagtagggggacgcgaaagccccggtggcgagccggggctttttctatgccctgtgtcgggcgaggcagaccgggatgatgctggggtctgccaggagggtcaccagggggcctaaggcgcctatggggtcgcgtcgggcgtagtcgaggtcgcaggtgcgtccgaacccttggaggagcatggcgagtgcttcgtccgggag

SEQ ID NO: 36262 - DNA, 124 bp, Unknown
  Description of Unknown: RightRegion for integrase B10263 sequence
cgaacggaaattggattcgaattaaaatgcggcattacgctaaaagaaaggctggtgaggtaaatgagtcatacaccattcggctaccggattgaaaatggaaaagccgtaattgataaagagg

SEQ ID NO: 36263 - DNA, 260 bp, Unknown
  Description of Unknown: RightRegion for integrase B10264 sequence
cgtggtcacggacacgaagaagacttttctattaccgtataccctaagcttccaaaagtataaagtttacctctatcttatcggcaccgaagagctcggcttgataagatagaggtaataacaaataaagcctccgggggatatcctcggaggcctttgctttacttcttaacaattattgcctgcagcctgtcgatagacacgccgtaaattccggcataaccgtcgctgtttttgtcgttccagcctgtgacatacgg

SEQ ID NO: 36264 - DNA, 59 bp, Unknown
  Description of Unknown: RightRegion for integrase B10265 sequence
gacaaagactctttcctcacaactctacgggacaacatcgcaaccgtcataaatcgtga

SEQ ID NO: 36265 - DNA, 242 bp, Unknown
  Description of Unknown: RightRegion for integrase B10266 sequence
gttagcactttgctaacggctttttgttttttatatcactttgcaaacattttgcaaacataaaaaataaaagcagataaaaatagataaaataaacgtactggcctctgttatatcgttacccctaatactacataagctgctctattgataatatgaccgtctgttcttactttgtaatggatggcatccataaatatgaaagtgtatatcttttctaatggccttgattgccattcttt

SEQ ID NO: 36266 - DNA, 260 bp, Unknown; identical to SEQ ID NO: 36194
  Description of Unknown: RightRegion for integrase B10267 sequence

SEQ ID NO: 36267 - DNA, 260 bp, Unknown
  Description of Unknown: RightRegion for integrase B10268 sequence
attggtgtactaagcgggtcacatccgaacccgcgagtcctgatctacaccatcgcggtgtaataaaagaacccccggatttctccgggggtcttttcatatccatttttacaatacatagccttcatcattatcaggcggtttcttctcagtttcctcttcctgattctcctgcttcttctgatccacctccggcaatccggtcagggccagaagcatggccgtgatgaagccgaaggctccggcagacagtgccgcca

SEQ ID NO: 36268 - DNA, 260 bp, Unknown
  Description of Unknown: RightRegion for integrase B10269 sequence
aaaatggataaagatttttctattattgttaaagaatatgctttacaaaacgctgatttatagaagtgcgtctttagttgttattctaaaagtaaataataaaaggtatctttacttagataccttttattagaatataattaatttatctcctttaatctattaatatttatatcagttttaattattatgtgtattgcatcatttgttttatgtccactcatgataaaatgttcaaattctagtttctttttctctcc

SEQ ID NO: 36269 - DNA, 260 bp, Unknown
  Description of Unknown: RightRegion for integrase B10270 sequence
ctagggagatggcgcgtcgttgccgtgaaagacggctttggactgtcatcgtgcttcggctgatggaagcgccctccttttccgggagggcgctctttgttgcgccggccacgtgcgagacgttcgggcagaaaggagaaagatccccagccggcgtcaaccgaagctcttgatgattgcgacgaggacgagaagcgcagcccagaacgcgcagaaagcaaggactgcaatctccctgtcgctcaattactgcgccttct

SEQ ID NO: 36270 - DNA, 260 bp, Unknown
  Description of Unknown: RightRegion for integrase B10271 sequence
attggtgtactaagcgggtcacatccgaacccgcgtgtcctgatctacaccatcgcggtgtaataaaagaacccccggatttctccgggggtcttttcatgtccatttttacaaaacatagccttcatcattatcaggcggtttcttctcggtttcctcttcctgattctcctgcttcttctggtccacttcgggaagacccgtcagcgccagcagcatggccgtgatgaaaccgaacccgcccgcggacagagctgctg

SEQ ID NO: 36271 - DNA, 260 bp, Unknown
  Description of Unknown: RightRegion for integrase B10272 sequence
atcatccgatccgtcgtgaaagagtgtacgtgggacggggagaccctttctcttttgctctaatgttcactattttattatgaggggttctgcgtgcatcatgaaattgtgaaattaaagcacagaaattcgggcacagatttttagatacactgtgcctcaagttcgggcacagttatttaagcacagaacgagaaaaagccctccttgcggagggcctttctcggttgtgagggggcacaaccttaagatgaggaata

SEQ ID NO: 36272 - DNA, 260 bp, Unknown
  Description of Unknown: RightRegion for integrase B10273 sequence
gacttgcagagatgcaagtcctttttcgtgtttacagcgtttttctgcaggattcgggtgtaaaaggattcatgtttgtaaacgatgtaaaggttttgaccacttttttgaccacaacgtaaacgaaatcacaggtacttttctatacagttcatggcctcgactttcgtttccattgtggagtgggcgtagagctgtaaagtcagggaaaccttggtgtgtccgaggatttcggacaatgtgcgcaagtccatacccga

SEQ ID NO: 36273 - DNA, 260 bp, Unknown
  Description of Unknown: RightRegion for integrase B10274 sequence
acccgcgcagacaatcctgccgagcatatgacactggatgtctatccggcatatccttcctgatttattagggatagcatggaaagaagaatgaattcttctttccatgctatccctatttttccgtagaacgcgaaaaggccggggcttttgccccggctgtcttacttcttgggaatcatttccatgtacttccgcagtttgtgcggaccggcgtccttgtctttgaggaaatcgcgggcgaggtggccgtagtattc

SEQ ID NO: 36274 - DNA, 59 bp, Unknown
  Description of Unknown: RightRegion for integrase B10275 sequence
ccggatgctaaaatgttcgttttgactcctgatagctccaccagaaccaaagcactaca

SEQ ID NO: 36275 - DNA, 260 bp, Unknown
  Description of Unknown: RightRegion for integrase B10276 sequence
atgttaagaaaattactaaaagagtgttggtttgacggtgaaaatttgcatattaagatatagaaaaatactccccacaccattatgataccatctagtcacataataatatggggagtttacattttaacaagaggcgaatataatataattagcttacataccatgtgtatgtgtagttccttaagacgttactatttaaagtagcgtcttttgctttttaaatcctaataacatacttactatttagagatatccaa

SEQ ID NO: 36276 - DNA, 260 bp, Unknown
  Description of Unknown: RightRegion for integrase B10277 sequence
gataaccccaccgactacatgtccatcgatatttatcctgccattccctctgaaaataggtagcgcatcatatttataattcatttttcatgtgatgatatacccattccaaaatgttcacagccggggctttcgccccggctgtgttttagccctttggaatcatctccatgtacttgcgcagtttgtgcttgcctgcgtccttgtccttcaggaatgcctttgccatgcaggcgtagtattcgggtttatcgacgttg

SEQ ID NO: 36277 - DNA, 260 bp, Unknown
  Description of Unknown: RightRegion for integrase B10278 sequence
atgttaagaaaactactaaaagagtgttggttcgatggtgagaacctgcacattaagatatagtaataaaatactccccacaccattatgatactatctagtcacataacaatgtggggagtttacattttaaatcctagtaacatacttactgtttaaagatatccaaccagcaccacttttaagtttgccccaagtaataccatcagcaccagcaacatccacaatagtaaaagcctcacctttttttactacttggt

SEQ ID NO: 36278 - DNA, 61 bp, Unknown
  Description of Unknown: RightRegion for integrase B10279 sequence
gccgatgccgccgtctgccgcggctcctttcatgccgttttgggcggggaagccggtgagg

SEQ ID NO: 36279 - DNA, 260 bp, Unknown
  Description of Unknown: RightRegion for integrase B10280 sequence
cgctcacggcacgaggcagtattccatctcaaatgcgggctcacgctcacggaaaggatgtgaaaatcatgggacacacaccatacggatacagaaccgaaaacggcaaagcggtcatcgacgaagagaaagcccagcagataagaaacctctacaggaactaccttgacggaatggcgcttgccagggctgcgcacgaagcaggaatcgagacgtggcacggctcggcaaaacgcctgctcgaaaacaagcactacctc

SEQ ID NO: 36280 - DNA, 62 bp, Unknown
  Description of Unknown: RightRegion for integrase B10281 sequence
cgagaaattgcaataaaaaacacattcgatgtgttcgaatgtgttttaaatggtggaggtta

SEQ ID NO: 36281 - DNA, 260 bp, Unknown
  Description of Unknown: RightRegion for integrase B10282 sequence
ctgaacgaacatctggcggtgcctgatagaaggtctgtcctggtggctgttcttctaaattaaaaaaggtccgggacctctcctggatcttttttgtcttaagactgacttaataagacctttttattgttgcactttgtagcacaaaaaaacacctcgaatgaggtgctttttcgagccacatcgaatgtgacctttctgtctgaagtcagtataacaaaaaacggtcccacggttatcccgtgagacccaacaaaaaa

SEQ ID NO: 36282 - DNA, 260 bp, Unknown
  Description of Unknown: RightRegion for integrase B10283 sequence
ggtggaggcgaaccatacctaactatatcactgtccattgaaagaagtgaattatataaatagcttggcctgtcactacccccagatttcatgaattgccctgtgaagtatcttctttttgtactgcaaactagagttactattaatgtataaaacttacccaagtggccataattattattattgtgtgaaacccatattttttagtttttttcattttttacctttatagccaggcatggattccctggctttttttt

SEQ ID NO: 36283 - DNA, 260 bp, Unknown; identical to SEQ ID NO: 36226
  Description of Unknown: RightRegion for integrase B10284 sequence

SEQ ID NO: 36284 - DNA, 260 bp, Unknown; identical to SEQ ID NO: 35683
  Description of Unknown: RightRegion for integrase B10285 sequence

SEQ ID NO: 36285 - DNA, 260 bp, Unknown
  Description of Unknown: RightRegion for integrase B10286 sequence
gtgaaatccgaacctgggcttgtgtttgtacacgggctaatcggattggtcatcggaagatgacgggaaaatggccggcggctggacaccggctcttttttcgtggaaaatagaaaaggctccccgcggcgagcggggagcgcgttttttattcggcctgttcgggcgggtgttcttgtgggacttccggcaggcccgccaggctggtcagcagggagaggacgcccgccatggcggcgacggagagcgtgccaagccaa

SEQ ID NO: 36286 - DNA, 260 bp, Unknown
  Description of Unknown: RightRegion for integrase B10287 sequence
ctatcaagggaaaagatcgcctttgaactaaaatgcggactcacactaacagaaaggatgtgaagaaatgggacacaccccttacggataccggatcgaaaatgggatcgcggtcatcgacaatgatgctgcggacagactccgtaacctatacaagaactaccttgcaggcatggggctcatgtcagctgcggcagaggtcggaattgacgcctatcacggcagtgtcaagcgactcctgagtaataaacactatctcg

SEQ ID NO: 36287 - DNA, 260 bp, Unknown; identical to SEQ ID NO: 36222
  Description of Unknown: RightRegion for integrase B10288 sequence

SEQ ID NO: 36288 - DNA, 260 bp, Unknown; identical to SEQ ID NO: 36193
  Description of Unknown: RightRegion for integrase B10289 sequence

SEQ ID NO: 36289 - DNA, 260 bp, Unknown
  Description of Unknown: RightRegion for integrase B10290 sequence
tctggtgtaccaaccgtgttacatccgaacacgcaggtcacaatcttccgggttgcgatctgagccggatgaaaaaaggccaccgtcaggtggctttttctttttccttttccatgtcctcccggatcagccgctttatgtacccctgtatgttttcctgctcctctatccattccagcagctccggctccgtcttccggttgatcttcagccggatctgccggatgttttctttttcatactggttcaaatattccatg

SEQ ID NO: 36290 - DNA, 260 bp, Unknown
  Description of Unknown: RightRegion for integrase B10291 sequence
ttcgagtcgctggagttcttctttgggatggccaaggtcgtccagatcgaggtggctgcatgatcgaccaccgcgatacgcacgtcgttcgcatcccgatcgatcagatcacggtcatgaacccgcgcgaacgtggtaaggtcaagttcaagcagatcgtcacgaacatctcgcacatcgggctgaagaagccgatcaccgtggtccagcgcggctcgcgcgacggtaagccgctgtacgagctggtctgcgggcagggg

SEQ ID NO: 36291 - DNA, 260 bp, Unknown
  Description of Unknown: RightRegion for integrase B10292 sequence
gaccgactcagccgcatcctgccggggtggctagagagcatcacggcacaacgggcagcctgacagcccgcacacagaccaacggcgcgcttccccggacgagggtggggagacgcgccgttggtgtctgtgcggacctctcagcgggctacagccaccacgggaccatccccggtagcccacgcggtcccgttccagtgccggtgaatgccatcaccggtgatcacgtgctgtcccacggtccagagcgtggcgggact

SEQ ID NO: 36292 - DNA, 260 bp, Unknown
  Description of Unknown: RightRegion for integrase B10293 sequence
aaagcacataatccgaacctttatataacgaagaagttcgttgccttggttatcggattataaagacaaaaagacgaggattattccccgtcttttttctttttgattttatcgtatatcttcctaaccgccgccgtcaatgctatgcaaagcggaatgaatggagtgaacggcgcaagccaaaacgcccaacacgccgagccgaccgcccaccaccattctatcccggtgataatcgctatgaagtatggaatccacac

SEQ ID NO: 36293 - DNA, 260 bp, Unknown
  Description of Unknown: RightRegion for integrase B10294 sequence
ggagatgacatcctggtgcgcttcgggaggacaagaggtgaggccacgtcgcgtctgtgctgactaggctggctggtggagcggatgagtctatgaggggtggactcatccgctccttcatgtctgggtggcctcggaaaccctccccagatccacggagagcgcacagaatggcttgtgggtagttggggaagggtccggtgggttgtgtgcgtggagacagggagactggacgctggcgacatgatcaggatcaggga

SEQ ID NO: 36294 - DNA, 260 bp, Unknown
  Description of Unknown: RightRegion for integrase B10295 sequence
tgtaggctgcttttgcaatcacattcgaacaccatcgtcattttgtacgacgtccggttgtgaaaaggaaggtgcaattcctgcaccttcctctttatttatacatcgcctgtatcgttttagcctccgccgctttctcgatctgcttctcatgaagatattcatataccgccatcattttttccggtggttctccgttttcgcttctgtattttgcgatcatcgccaccacgccgtcatgcagcatccgcatatgttcc

SEQ ID NO: 36295 - DNA, 260 bp, Unknown
  Description of Unknown: RightRegion for integrase B10296 sequence
ataacacacagcatgcgaacctctgtatacaaaacggttttcttgattaaagtgaaaatatgacggcaaaaacggagaggcggtgtttttgttgcgccacctctccaattagtcattccacaatagaagaaactttcaatgtaatatatcctctttctaatagttttgccatgtctgtacttgccgggagctccaattgaagcaaatccccgctcgtgtcgttcaaacgtataagaagagtcccatcgtacatgtcgtta

SEQ ID NO: 36296 - DNA, 260 bp, Unknown
  Description of Unknown: RightRegion for integrase B10297 sequence
gtacaatatccgaactctgcaacagccgtgtaccgtatagaattgcacaaaaaaagagcctgaggccgaaacctcaggcttatcactcactaaacatcaggcggcttcttttccttgttatactgagcagtgctgatacccagcagcgcacccagcagcgtacacaccgcggccgcggtcttcgcgatctcatcagcatagggccagccccaaatcccagacagggcaacataggccgtagccagagcggggatcaccac

SEQ ID NO: 36297 - DNA, 260 bp, Unknown
  Description of Unknown: RightRegion for integrase B10298 sequence
cgcggaaaatacggcccgagagagggcgaaggcatcaagctcgaggtgttcttgaggctgtaaaatttttttacggcttcaatacatcatagggtcgcacattcgtctggcgtgtattgttgtattgaatatttaagagaagaggacagagcccgagagccctgtcctttttgagtttcttacttcttcggcgcggtgtaggtcatcgcctggtcgctgtcggacacgcccgccgtggtcgggtcggtcacgatgccgag

SEQ ID NO: 36298 - DNA, 260 bp, Unknown
  Description of Unknown: RightRegion for integrase B10299 sequence
ccgaacaccttctttataggagtcgtgtttggacaaacaagaaaacaccgtgtagagccataagactccgcacggtgttcttgttttagatgtgggtgagaagtgttgcaagctcctcacccactaaggaggaaatatatgctcaatcggttgcaagccgagcagagccaaattaggaatttttcagttcgtgaacagcagactcaatcaggttgttaatgctttcggtgtcgatagtatagcctttgctgttcagatac

SEQ ID NO: 36299 - DNA, 245 bp, Unknown
  Description of Unknown: RightRegion for integrase B10300 sequence
aacctctcaatcctaaatgagtataacatatttgtgctgattgtcaattctccggctgcttaggatcctctgtgggctcctctgcggccttttctttttcagaggtataaatatacccctcaaggccgttttcttttaatttggccaaattctcatcagctgctgccttgtcaaaaggtcctgcattcacaaccaggtaatcaccctctgtgatattaaccttagcgcaatgctctgctgcctca

SEQ ID NO: 36300 - DNA, 260 bp, Unknown
  Description of Unknown: RightRegion for integrase B10301 sequence
gtatccgaaaccgtctttttctatggactggctttgtgtcagcttctcaatttgaaaaagtaaggcggaactgtgaaacaaaaaaacaccgaggattttgtccctcggtgtttttgttatgcgtaaaattctttgagtgcgtatgcgatttgctttccgaagagggcgacctcgatgtcgcacattccgggtgttgcgtaaacgcacaaatttgacctttttagcggtcttttcttttggactacctcgtacattccgaa

SEQ ID NO: 36301 - DNA, 260 bp, Unknown
  Description of Unknown: RightRegion for integrase B10302 sequence
gttaaatccgaaccggggcttgtgatcgttcacgggctaatcggattggtcatcggaagatgacaatgaaaaaggccccgccgttgtggcggggccttttgtgttacatttcttcaggagggtggtttttcgtctggatcaattcgatggccagggtcttcacggcggagagtccggcgcaggcagcgctcaacaggacggacgtccaggcggcgctggtgaatgtgtccacggagatggtagccgggagggcgacaagg

SEQ ID NO: 36302 - DNA, 260 bp, Unknown
  Description of Unknown: RightRegion for integrase B10303 sequence
aatgctccaccagtcgtgtcacatccgaacacccggattgtgatctataccgttgcggtataggaaaaagcccgccggaaatccggcgggctcgttctatcgttacgccccgttccgcctactgtatcccccgcgcggcgcgcaaggattcagcggaacagggctttactcgttgaatatttctttttctgcgtgtttcttcttatcgtccagctttgcaaaggtcagttcgtacgaccccatggccgcgagcgccacaa

SEQ ID NO: 36303 - DNA, 260 bp, Unknown
  Description of Unknown: RightRegion for integrase B10304 sequence
aacctctcaatcctaaatgagtataacatatttgtgctgattgtcaattctccggctgcttaggatcctctgtgggctcctctgcggccttttctttttcagaggtataaatatatccctcgaggccgttttcttttaatttggccaaattctcatcagctgccgccttgtcaaaaggtcctgcattcacaaccaggtaatcaccctcagtgatattaaccttagcgcaatgctctgctgcctcatcctttctcttggca

SEQ ID NO: 36304 - DNA, 98 bp, Unknown
  Description of Unknown: RightRegion for integrase B10305 sequence
accaccacgtcagggcaaggctgttttgtccaccgttgctactgcaacggcttgacctattagcctgcccttcctttattccaaaaatcttttgtttt

SEQ ID NO: 36305 - DNA, 260 bp, Unknown
  Description of Unknown: RightRegion for integrase B10306 sequence
cgttgtaccgtcaaggatttacctattaccctggcttggctaactggttctgaggtcgtttaaattgatttgatgtttaaaaaggtaaatcatcgtcggctggcttattgtaattgtagtgcaaatcccttaactcttcccagctcagtgttgggaatttgttttggttgactgtaaccttaaactgaattaaaccacttttgattttagtcaacatatcatcagtttgatattgtaaatgtactggtttttcattcttt

SEQ ID NO: 36306 - DNA, 260 bp, Unknown
  Description of Unknown: RightRegion for integrase B10307 sequence
ttaccaaactccccgtcggttcgtacaacgggaggtttggctccccgaacgcaaccctcttagaacacacatcctggccgtgttatggcaggagattttgtccaaagggtgcttgtgcgcttcattgttgggctctacttgttaacaccggcttgatcgagataatctcctgcatcctgagcaatgaagatcacgttcggcaggtaatcctgcaggagggggcggtgaccagaaaccccttggccaacacggcctacgag

SEQ ID NO: 36307 - DNA, 260 bp, Unknown
  Description of Unknown: RightRegion for integrase B10308 sequence
atcgcacgcagtgtgctgcgcaaatgtgtgtgggacggggatactctttttttagagttttgatttatgtatttttgtgactgttgggactgcaatagaatcaaaaagatgcaaaaaaacatttgaaaaggtattgacacgccactcattgagtgttataattaagatacattaaaggaagggaggtggtgatgtgaatgatcccatagaaataataaaagacctgctcgagatcatcgttcttctcgaaacgcttcgaa

SEQ ID NO: 36308 - DNA, 260 bp, Unknown
  Description of Unknown: RightRegion for integrase B10309 sequence
tccggtgtactaatcgttacacatccgaaccagatcctcttctggtatatctcgcggatgtaaaaagatggtgcagaaatgcaccatttttttatttatacattgcctggatgtttttcgcttccgctgccttttcgatctgcttttcatgcagataattgtaaatcgtcatcatcttttccggcggatttccggtttcattccggtatttgataatgatatttgcaactccttcatgcagcatccgcatgtgttccatt

SEQ ID NO: 36309 - DNA, 260 bp, Unknown; identical to SEQ ID NO: 35782
  Description of Unknown: RightRegion for integrase B10310 sequence

SEQ ID NO: 36310 - DNA, 260 bp, Unknown
  Description of Unknown: RightRegion for integrase B10311 sequence
tctggtgtaccaattgtaacacatccgaacacccgcgtcacggtgtacctggtcgcggtgtagcggaaaaagaaaaatgacccccggattcgttccgggggtcgttgtattttacgctttttgtttaagacgcacaccctgccgttgatggatgtgcgtcactcttggggcggttggtctttattgtactgcgcggtggaaatacccaggagtgcacccagcagcgtacacaccaccgcggaagtcttcgcgatggagtc

SEQ ID NO: 36311 - DNA, 260 bp, Unknown
  Description of Unknown: RightRegion for integrase B10312 sequence
gaaatcaaagtctccactaactggttttgcataataacactgtttagctcgaaaaaaagttagcaaaattcaatatgagcttgccttattatggggtataccctataataatagacgtaagaaagaaaggaggtggttcaaatggatgacaaaatatgggacttaacgattgctgtcataagcgtgctactggcaaaggcgctggatgaaggaatcgaagccctaaagaaaaagacctctcgtaagcccggaaagcacac

SEQ ID NO: 36312 - DNA, 260 bp, Unknown
  Description of Unknown: RightRegion for integrase B10313 sequence
gatgtcattgactttggacaggccaagggtggacaggccgtgctagatgtgtatctgaagtaagggcaattaattttgcccttggttagtatcatgaacattcgattttaatctactattcatcatactaatgatgctccaaccattaccgcaccgccattatagcctatacggacacaaaaaggaagactgaattgtcttccttttttgtatattgacttccatatttttgggatttataatattttcagaattttgaa

SEQ ID NO: 36313 - DNA, 260 bp, Unknown
  Description of Unknown: RightRegion for integrase B10314 sequence
ttaaagaaagctttaagtcaagagtttatttcaagtctaaaagctttagatcttgcagcataaaaaaacacccacccttattcagagtgagtgccaaaaaagaaatagcaaaagaagtcaggacaattagcaaggctttacgaaaagttctttttctgctgctctacgccttacaagcccttgaaggacttttttatttgcgtaaacccagcgcccgaattgtgcggctgcttcactgtactttttttgatttaataatt

SEQ ID NO: 36314 - DNA, 260 bp, Unknown
  Description of Unknown: RightRegion for integrase B10315 sequence
gattattatttagaaagagatgaaataggagatgtgaatttttatgttagcaccaaatgttaaaataatagaaccgacaaaaaaggtcgacaaaacttataacggaatgatgcaagacctacctaaaagagtgtgtggttattgtagagtatcaacaaactcggaagagcaaaagacaagttatgaatcacaaaagatttattatgaaaacctaatacgaggccgacaaaattggatattcgctggaatttatgcagatg

SEQ ID NO: 36315 - DNA, 260 bp, Unknown
  Description of Unknown: RightRegion for integrase B10316 sequence
aggttatgtagtcaaactcgaacacttccggtccttttagtcacactttcactcgctgcataaataataaccgcaggtttttacgcctgcggtttcgcacttaattatcttaagtattcctctatagccgctctgatcacttgtgcctgtgatactccttctttactgcacttctctttgaatctattcacaagatccttgggaagcttaaccaatatagtcccatacactttctctgcatatcggttttttactgccgc

SEQ ID NO: 36316 - DNA, 260 bp, Unknown
  Description of Unknown: RightRegion for integrase B10317 sequence
aaatcacacacaagatttattagaaaaaggtacaacgcaaagggggttagccaaaacggttaacccctttttcataaaaaagataataaaaaaaataataactataatataataatatggctctaatttttcatttcgttatgtaattgatgatggtgaaattcacaaagtgccattaaattgtttgggttataccccaattctttcatttgtaattctgattcagctttacttattggtgttatgtggtgcacctctgt

SEQ ID NO: 36317 - DNA, 260 bp, Unknown
  Description of Unknown: RightRegion for integrase B10318 sequence
gaaatcgtagtcatgttaagaaagaatttaaatcttattaatcagtctcttctattttcttaaaatagtcatttttaattaataaccacattttttcatcaggaacatttaagcatttttgaactttcttccaaaacttaacagtgccatttctcttgccattttcaatatttgatatatatatagctgtagtttcagtcgcttccgctaattgcttttgcgtgcaattcattagatttctgaagaattctagataacag

SEQ ID NO: 36318 - DNA, 260 bp, Unknown
  Description of Unknown: RightRegion for integrase B10319 sequence
gggcgagtgaagaaaacctcgcctgcgaaaaacaggaagcggggaaaagcacgtacaaggtaatccgccaattttgtgaatcacgattgaaacccagcccgccacgagccagagtcccaatatgcgctacctgctcgcaattgtgttgcctccggtcgcggtgctgctttgcgggaagccgtttcaggcgatgctgaacctgattctcacgctgttcctttggatccccggcgtggtgcatgccctgttcgtggtcaata

SEQ ID NO: 36319 - DNA, 260 bp, Unknown
  Description of Unknown: RightRegion for integrase B10320 sequence
atcagggctaaattgaccgattttttcccaccaccagtcgaactatctgagcagagcggctgaacgagcgttgtgcgcctgaagcaagccttccagttcgctgaccatatccagggccttctcacgttcgaatccaccgcctccgatctcaccacggccactgcctttgcacggctggcagatcatgcggtgggtggtgccggtgccatggcaagcgtcgcattttccatcgagccagtaggccagcgagcgctcggcaa

SEQ ID NO: 36320 - DNA, 260 bp, Unknown
  Description of Unknown: RightRegion for integrase B10321 sequence
gcgatcgcgatcagaggctctgacctagagagcaacctcgacctcatcaggagagttagctagacgcgagatggtctagcagcggtatgaaagtattgagtgactcccgcaggatatgaatccttcccccaatccggattgccccgagcttgtaacgaagctcggggcattttttgttatgtatcccagttgtacaccagttacgaacggtgtcatcacacacgaagatgttgtgagctgctagttcagcaaccacctct

SEQ ID NO: 36321 - DNA, 260 bp, Unknown
  Description of Unknown: RightRegion for integrase B10322 sequence
agtctggcttcccagtgtgtgtccgctgatgcagcggtagaattgatggaagtgttgaaataatcacagtgacccctccatcacccccttaatcaaaggtatccatacctccagagatttcttcataacgtagatccttccaccaatcctaatagcctcaagccggtaacgcagcttggggctttttttattggcgagcccccgcgtacaccagttgcgaacagtgtcggggcatacgtgaatgtcatgcttcgccagca

SEQ ID NO: 36322 - DNA, 260 bp, Unknown
  Description of Unknown: RightRegion for integrase B10323 sequence
gacaatgtacgaaccaccctgatcttccgcaactatgggatcattgttgtggtaccgtactaaaagaataggctccgtgcttaacaggcacggggccttttctttttgccctcgcgcccctccctttcctgtaataatcttccgttgtgtcgtatttatcttccaaattcgacacgaaatcccaaaaaagcggtagattattccgcagaaggagcgtacagaaaatgatacggattcatttgtccagacttctcggcgaa

SEQ ID NO: 36323 - DNA, 260 bp, Unknown
  Description of Unknown: RightRegion for integrase B10324 sequence
ggacgttggagtggcaaaatagatagtttcacactaatactatatcctaatctacctaattaattttttatgcttatcactgataacattatggtgcataagaataggtaccaatatgttatcagtgacacatttaaccgatttatatcaacttattatgttgttttatatttattaatctatctcatggtactatctcatacaatcaaaaagagcaggaatccacttcctactctaatagttttatcagttccaatcct

SEQ ID NO: 36324 - DNA, 260 bp, Unknown
  Description of Unknown: RightRegion for integrase B10325 sequence
gagaagaatcaaacaggtgatgatttcacaatcgagatcacacctaagttcccgggagagtagttatcattctatggtttgcaaattgaccatagaatgatatccattaagtgattgcgctatgaatggtgtatataatataatttagtcagatgcggtggcggaataggtagacgcacgcttcagctacaacggacgtatgcgcgtcagataacacgtgcttgtagtgctcgtgatacgtcatgcaaggtgcaaatcct

SEQ ID NO: 36325 - DNA, 260 bp, Unknown
  Description of Unknown: RightRegion for integrase B10326 sequence
gatgtgcacctggctcaggccggtgagcctgcggcgtccgagggcgaggaggtggcggcgtgagcgcgagttccgagtctcggcctgcggaggccggcctcgtcagcgcgcagttccaccgcgtgcgtcgggcgacggtgcgcttccgggagggggcgagccccccgccgcgagaggcggcgcgccggccagcgcacgtcgcgcgaatgctggccctggcgcaccatgtggaatccgtcattgagcggggactggtggcg

SEQ ID NO: 36326 - DNA, 260 bp, Unknown
  Description of Unknown: RightRegion for integrase B10327 sequence
gagaagaatcaaacaggtgatgatttcacaatcgagatcacacctaagttcccgggagagtagttatcattctatggtttgcaaattgaccatgtattgataactacttttttatttacgattaccacaaccaccacaagaaagcccctgcttatgcaggggctttctacttaattttctacttacatattacttatgcaatcgtcttccctttctgagtcggaagcatgagttcatactgttcggcaagctgatatagg

SEQ ID NO: 36327 - DNA, 260 bp, Unknown
  Description of Unknown: RightRegion for integrase B10328 sequence
ctgctactggcaaccgacccggccgtgttacctgtaaaacctcagtggatcgcgttggattgagactcgctttcgcacgcgaacgagtctcaatcagccatctcctatccgtcagattctcctgatccgctgttcactcctcttagctcttcgctcaagatgtccacggcctgttcctctttcgccatctcatcctctatctgcttgagtaccccgtccaagttccccaacttcttgttgacgcggtggcgcaagccgag

SEQ ID NO: 36328 - DNA, 260 bp, Unknown
  Description of Unknown: RightRegion for integrase B10329 sequence
ttccacccgacgggcatccggtcgctcgccgacgagatgaaacggaaggaggccatcgcatgagcaagggaatcaccatcaccaaggaagtgcattttcgtcatgggcgcggcagacggaaggtgctcgcggagggcgcgccgcctgaaatgacatccctgcagcccggaagcgtgccgcgtttggcgcgacttatggcgctggcgattcggatggatcgcctcgtcaagagcggagaggtgacggactacgccgacctc

SEQ ID NO: 36329 - DNA, 260 bp, Unknown
  Description of Unknown: RightRegion for integrase B10330 sequence
attggagagtggtttcaggagctcgaggcggtgctgccgctcctcggtgagcagcgggcgtgagcgagatcgtgctctcccccgccgccgcccggaaggcggttcgttcgtctcagcgcagccggctggaagatctgctcgtcgcccgaattgcccaggctggccttctcgcccccgaacgtgagctccgctttgctccgcctcgccaatggcgattcgacctggcctggccggacctgcgcctcgcgctcgaggtcgac

SEQ ID NO: 36330 - DNA, 260 bp, Unknown
  Description of Unknown: RightRegion for integrase B10331 sequence
tccggtctgccaaccgtgacacgtccgaacccgcggatcacgatctaccggatcgcggtgtgaacggacaaaaagagaaggcgcttttcagcgccttccttttttatcccgccatgcgatccatcagctttttgatgtccatccgcgtcgcttcatccggcgcctcgtccatcatcatccgcaggtgctcgttccagtccactccgcgactgtatccgttccggctgtagcggctttcgttccggccttcccggccatag

SEQ ID NO: 36331 - DNA, 260 bp, Unknown
  Description of Unknown: RightRegion for integrase B10332 sequence
tcagctctgccaactgtgtcacgtccgaacccgcggataacaatctaccggatcgcagtgtgaacgcataaaaagagaaggtgcgaaatgcaccttccttttttagtttgccatgcgatccatcagctttttgatgtccatccgcgtcgcttcatccggcgcttcgtccatcatcttccgcagctgttcgttccagtccatcccgcggctgtaacccatgttgcggttctcccggccgtagcggctgtcgttcctggcgt

SEQ ID NO: 36332 - DNA, 260 bp, Unknown
  Description of Unknown: RightRegion for integrase B10333 sequence
ctgatgaagaagctactaaaaacctgcacatgggatggtgcgaaggttacacttattgtgtaaaactgttgcactttgccagcaaagagcatcaattatacacgggaggtttggacatgaatacaaagggtgggaaggcgatctacgcgatcgcatgctttttcaaattactggcaaaggccatgttctggcttgccaacgaatatgactaccagatgccaaggcttggacgccgggcaaaatggttggcggaagacatc

SEQ ID NO: 36333 - DNA, 260 bp, Unknown
  Description of Unknown: RightRegion for integrase B10334 sequence
gcggcggaaattcggcgttatcaagcggccaattgggattttaataccctgttggcagcataattatggattaaataatctgttctggcggttgccggtgtcaatatgcaaccatgatatattgttttcaaagtttaatccgtcaaatgccggcagcaacatcaactgttcgcggacacgattgtatgctttaaccttggcggctttatcaccggcacattccaattcaattgaccgtatatgcaaatccaacgcacgcc

SEQ ID NO: 36334 - DNA, 260 bp, Unknown
  Description of Unknown: RightRegion for integrase B10335 sequence
tgcggtagtaagtccttcccgatactgcccacaacaacaggaagaactggatggcggagttgacgacggcgttgccgacgtcccccacgccgtagatgagtttggtcgtgcccttgagtttgtggtccctctctgccacggggctgcctccttgtcaatgcgcgtgggtgctcccggcggaccacagtccgccgtgctgcgaagccgctggactgttgtccagcgggagcagccctctcacatgctcccggcggacaaca

SEQ ID NO: 36335 - DNA, 127 bp, Unknown
  Description of Unknown: RightRegion for integrase B10336 sequence
aacagttgttcgactgggaatcatctggtccgagtggcgagaatcgaactcacggcctcttgaaccccattgtgcttctctcaaaaacgcaatggacactccgataccacttgtacgcagtatcatc

SEQ ID NO: 36336 - DNA, 260 bp, Unknown
  Description of Unknown: RightRegion for integrase B10337 sequence
gaggcgacccatcaccagtcgttcccctgtccaaccctcacattttccatcaatcgcagctgacatcaccaattataccacatccaccagaaaaccccaagccctcgcttggggtttttcctatctcatgtacatctcctgcataaccttgacctctgcagtctcgtccgcaatccacgcttttttgtcgtgtaccatggtcttcatcgcgcccattagttcgccgcctccgctggcctgttccagctccgcgcagaagc

SEQ ID NO: 36337 - DNA, 260 bp, Unknown
  Description of Unknown: RightRegion for integrase B10338 sequence
actcgcaacgaaaaccccgcagagtatatgtctttggacatataccccgcaatgcctgaatgaaattaggtggtgcatgcgattaagaattcattctttctctcatgcactacctaattgttggctttattgcgttataaatgcctgtgccggggctttcgccccggctttgcttacttcttggggattacctccatgtacttctggagcttgtgcggacctgcgtccttatcgcagaggaacgcttttgccatgtaggc

SEQ ID NO: 36338 - DNA, 181 bp, Unknown
  Description of Unknown: RightRegion for integrase B10339 sequence
aataagactggcattgtcgatatttattttaagtcagattttatttttgatacaagaaaataaataattaaataatgtcgtattttgtcgaatattgtagttgttatcattgttttataattttgtattaatagttttcacctttcgatattcatcccaatgatcatcggcgagatccgac

SEQ ID NO: 36339 - DNA, 260 bp, Unknown
  Description of Unknown: RightRegion for integrase B10340 sequence
gtcaggatcagtccggcaggtgtcgagccgaggtgtaacttcgttcccgtctgggctaactgacgtcttttacgcgtaacgtcgttggttattacgtgtaaaagacgctagaaatcccgttcgatccgacacgggcgccggtcactgaccgtcctggaagtgctcgtcgaagatccgcaggagatcgccgaggcggtcgcggaggcggtcggcggtcaggcgcgcttctgcggcagtgaggctgtcgatgtcggtgccgg

SEQ ID NO: 36340 - DNA, 260 bp, Unknown
  Description of Unknown: RightRegion for integrase B10341 sequence
aacagttgttcgactgggaatcatctggtccgagtggcgagaatcgaactcacggcctcttgaaccccattgtgcttctatcgagaacacaatgtacgatccgatactgtctagacccagcatcgttaaatttcaaatgcattataccattctgtttcattggatgtcaagaagtttcattccttttgtggtcaaattgtggtcaaacgaccctgacaaatgacctttctcccccggttaagttacatcgcgcaatttcg

SEQ ID NO: 36341 - DNA, 260 bp, Unknown
  Description of Unknown: RightRegion for integrase B10342 sequence
gtggagttcttcttcacagaccatgttttcgggtttgtacttacagtagagagaatagagtaatctattctctttttatttgtgcaatagcctgtataactttgtcatatcccacagtagccgtaaggaatgataggaacgcgagtacgataatctccacgatcacctttgcagtgacgatctcgcccgcaaaaataatgtagcatacgcaagcggcgaccgtaaagaccaccgatacgattgcggcgaggaggttagga

SEQ ID NO: 36342 - DNA, 260 bp, Unknown
  Description of Unknown: RightRegion for integrase B10343 sequence
actgtcctgctgatcagccggttgtgctttggactgattctccactacaaaacgccagcgtgatgctggcgtttttgctgtctcgcaattattccgcggtgtccgtgccttcgggcgggtgggcttcatcctggatgaagtatttgtcgctgctttcgcgtgccgcgtcgatcatgccctcaccgaagatgtaggcaatgagtgacccggcagacatgatgagtgcgccgatctgtgcggcctgctgttccgtctggccg

SEQ ID NO: 36343 - DNA, 260 bp, Unknown
  Description of Unknown: RightRegion for integrase B10344 sequence
aggccaaaaaatgctgccccgcttttcagtgagacagcttcttttgttatatacaagttataaatccggaaatatattcaaagggaaaaatgacgtaaattattaacccgaggttgttttttcttcttgctttttccttaatgttgtgatataatgatgtaagatgcttggtgcgaagcctaatattctttctgcggttgaataatccgcttactaacggtaaaaatagtataggaaaaattttaccgaagcggaggctg

SEQ ID NO: 36344 - DNA, 260 bp, Unknown
  Description of Unknown: RightRegion for integrase B10345 sequence
ggcaaaccgtttgtgtatggaaaatattatatacttattgtcccatttagtcacgcggcataaaaaaaagcggcgggtcagccctcgggagccttgccgccgctaaaacgtcggcgcggttgcgtcggcgttttcttcatgtcattcgagcgtattattgagcgcttgggcgatgaccgtcgcgccgatccacgagacaacgccgagaccggcagcgatcgccgaggctataatgaccgcgctcatctctttaacagacg

SEQ ID NO: 36345 - DNA, 260 bp, Unknown
  Description of Unknown: RightRegion for integrase B10346 sequence
gtggagttcttcttcacagaccatgttttcgggtttgtactaacggtagagaggatagagtgatctatcctctttttatttgtgcaatagcctgtataactttgtcatatcccacagtagccgtaaggaatgataggaacgcgagtacgataatctccacgaccacctttgcggtgacgatctcgcccgcaaaaataatgtagcatacgcaagcggcgaccgtaaagaccaccgatacgattgcggcgaggaggttaggt

SEQ ID NO: 36346 - DNA, 260 bp, Unknown
  Description of Unknown: RightRegion for integrase B10347 sequence
cattatgaaaaactgcggaatttggcggcaaattggaattgggcgttgccaatggcggcatagtttgtctatacagaccattttgctgatgtcagcaaaatgatatttcgaattttgggtgggtttgggtgttttccgaaataatcggaaatctggattatttccattttggaaatggttgcgggtgtgatataatatatttaaccattctctgaatcccccgccgtggtggcggggtttcattttaattatattttttg

SEQ ID NO: 36347 - DNA, 260 bp, Unknown
  Description of Unknown: RightRegion for integrase B10348 sequence
ctaagaaaacaggattggaaacagaaagaccaatttaaaattcaactctttccaaaaatatagaaggcagcggatcagcagccttctaatttgattttgctggttccttattcgtaaagaacgtagtaagtgccctaaatatctctgttttttttgtgataatatcatatctgaagcgttcatccttgatttgagaatacacactcattagtgtagatggtctacggttatactgattgaactgtttaccatatacacat

SEQ ID NO: 36348 - DNA, 260 bp, Unknown; identical to SEQ ID NO: 36246
  Description of Unknown: RightRegion for integrase B10349 sequence

SEQ ID NO: 36349 - DNA, 260 bp, Unknown
  Description of Unknown: RightRegion for integrase B10350 sequence
aaggcgaaccttttccaattcttaaatcacagatatccacttcgactgatcatacctttataacacggaagagcctatccataatgggtaggctcttattttataattcaaacgtgctgcgaattaattcggaaacgctcatatctttgctctgtgcgatttccttcaatttggtaaattccgcatcattaagagatatcactctctgctttctgcgattctccacacctactgtgataggcgctccggcaccttcacga

SEQ ID NO: 36350 - DNA, 260 bp, Unknown
  Description of Unknown: RightRegion for integrase B10351 sequence
tctgtcctgccacccgcaacgcatccgaaccacgtccttatccagtacgtcgtccggatgtgaatgaaaagagagatgctacatttttgtagcatctctctttcgttaccgccgattccagtacgggtcgatttcttcccgcggatcgtaggaccgcgccccggtcctgctcatgtagcgtccggttgtccggctgcgtccacgggcataggacctttcgctggttccgtcctcgctttcgcgcatcgccctgtaggttg

SEQ ID NO: 36351 - DNA, 260 bp, Unknown
  Description of Unknown: RightRegion for integrase B10352 sequence
caccgaatacccctatccataccaaccgaggaattttacaataaaaaagcggcatgggcttagacccacgccgttttctttatgaaacattttcgtcattctgtgtttcacgtgaaacatttttgcctttgttatagttggacaatccattggcggtcagacttatcagcatggctgtgagggccgctgggattaagttaatgattacgtcaaacaagatactgccagcaagcgataagacgccatcaaaggtgacagcg

SEQ ID NO: 36352 - DNA, 260 bp, Unknown
  Description of Unknown: RightRegion for integrase B10353 sequence
aaggcgaaccttttccaatatgtaaatcacagatatccacttcgactgatcatgcctatataatacacaagagcctacccatttggataggctcttattttataactcaaacgtgctgcgaattaattcagaaacactcatatctttgctctgtgcgatttctttcaatttagtaaactccgcatcattaagagatatcactctctgctttctgcgattctccacacctactgtgataggcgctccggctccctcacgat

SEQ ID NO: 36353 - DNA, 260 bp, Unknown
  Description of Unknown: RightRegion for integrase B10354 sequence
gatggcctgccaacacgattccatccgaactcgcagacaatggtcttcaccgtgctgctgtgatggaaacgaaaaaatggtgcaaaaatgcaccattttctttttgtcgtcaatgatcagccattatcaggaggttgcttctcaacttctggcaggcccgtcaaggccagcagccatgcggaaacgaaaccgaaagcgcctgcgctcagcgcagcgatccagtttacgtcacccagcacggctgcgccagcgccgatata

SEQ ID NO: 36354 - DNA, 88 bp, Unknown
  Description of Unknown: RightRegion for integrase B10355 sequence
tatatccgccatgagggtaagggaaagatagtatatgaattaaacatttttcttttactttgatatgtgcaacatgaggaggtaagtt

SEQ ID NO: 36355 - DNA, 260 bp, Unknown
  Description of Unknown: RightRegion for integrase B10356 sequence
gcaccaaaaaaagccgcaatgttaattgcggctttttcctttatttgcctaagtataatctaagagattgacagggggaaggcctggcgtctataagattccgccttcttgaacacagcaaagcagtatttcatcacgctgttatcatggggcgttcccgaattggagaacatattaaatttcttcagtagctggcggaactcatggaaagtatattgactatcttgaattattgtagaagatcaaattatctcctgaca

SEQ ID NO: 36356 - DNA, 61 bp, Unknown
  Description of Unknown: RightRegion for integrase B10357 sequence
ggctcttccggtgttcggatttcaaacgatacgccccgccacgtcgcaatgcgcgacgctt

SEQ ID NO: 36357 - DNA, 260 bp, Unknown
  Description of Unknown: RightRegion for integrase B10358 sequence
tgcttcaatggtggaggcgaattgactcttctgaagcacctaacatttccgtatcagaaatagcgggaacctagtcttattagttctcgttaaatttgtcgcaaaacctttaatctgtcgcttggcagagcacaaattcagagagataattgtttgaaaggaaagaggagatgattttgacagaaattatcgaaggtatcagcaaaagtgtttcagttcgagaggctgctgaatttctcggtaaatctcaacaatttatc

SEQ ID NO: 36358 - DNA, 208 bp, Unknown
  Description of Unknown: RightRegion for integrase B10359 sequence
gatttaactgctatggtggagcgtagggggatcgaatcgcgacgctcagcctgcaagccttgaaaagagaggaggttgcacgccatcattttttcatctaatcacacatctaatcatcgcagtcctcgtcaaacagttcgtacacagccactatttcattgccacacatttctccgttctccacaaaaccatacttgccatatatatc

SEQ ID NO: 36359 - DNA, 260 bp, Unknown
  Description of Unknown: RightRegion for integrase B10360 sequence
catagcattaatatatctctaatcaactcttgcatcactgtatatactgatattatgcattaatcaaataattttctatatcatattataccttattatttcaaattcaaacatcgaacactttaatattgaatactaaaaagaagcagttagagacctctgcttcttttttaagcggacttaagctggttatattttttcgcgtgatcaaagagataaacaaaaattaaattagtacatatttgtactttaatctattg

SEQ ID NO: 36360 - DNA, 260 bp, Unknown
  Description of Unknown: RightRegion for integrase B10361 sequence
aacgtgcatacacgaacacttacagacggtgttgttctactgtcaataatgttcagaccataaaaaaagaccggatgcaaacacatccggttttgttgtattcgggtacctgtgtcggctcccaaaacacagatacccatgttcagaaggaaactgaaaagggaatgtcaaattgaagtcagttctttgatggtatcatcaattgccttgtcatttttctttgttggttctttcagaattagcagaatctgaaccagtgc

SEQ ID NO: 36361 - DNA, 260 bp, Unknown
  Description of Unknown: RightRegion for integrase B10362 sequence
actgtacgaaccacagtgaggttccgtgaatatggaatcgttgctgttgtaccgtacaattagagaaagccctgtacgtttgtatacgtgcagggctttttctgcatgcagccgtggtcctccggtttttgtaataatcttacggaattctgatttatcttccaaaatcacacataatagaagaaaatgcgatagattattacaacagaaggagcgaccacaaatgatacggattcacctgtccagactcctcggcgaaa

SEQ ID NO: 36362 - DNA, 260 bp, Unknown
  Description of Unknown: RightRegion for integrase B10363 sequence
cctgtgtttttcttcatagaccacgttttcgggtttgtacttacggttgaaaagataggttaatcgcctatctttttcatttgtgtgatagcctgtatgactttatcatatccacaggtagccacaataaatgataggaagataagaacaactacctctacgattactttaggggtaatcgcttcgcctgtatagacaatgtagcacacactcgctccgagtgtaaatacgattgctacagctacagcgagaagattaga

SEQ ID NO: 36363 - DNA, 260 bp, Unknown
  Description of Unknown: RightRegion for integrase B10364 sequence
gtaaagctgggcgagaaggcgcggtacaggcgggaggtggtggctgtggaggcaaggtggtgacatgtataaatagggaagccccgtcctatttatacatgtcgcaatgtatgtacagtacaactcagcccaagtgatacctcgcgctcagcgtagtcgtcaggtatgtccttgatagcctctcgcagttcgccaaccgtgatctttctctcttcagccatgctccatctccttatccacggctctctccaacctccatg

SEQ ID NO: 36364 - DNA, 260 bp, Unknown
  Description of Unknown: RightRegion for integrase B10365 sequence
aaggcgaaccttttccaattcttaaatcacagatatccacttcgactgatcatgcctctataatacacaagagcctaccattatggataggctcttattttataattcaaacgtgctgcgaattaattcagaaacactcatatctttgctctgtgagatttctttcaatttggtaaactccgcatcattaagagatatcactctctgctttctgcgattctccacacctactgtgataggcgctccggctccctcacgat

SEQ ID NO: 36365 - DNA, 168 bp, Unknown
  Description of Unknown: RightRegion for integrase B10366 sequence
tactactacctgccaccggccggtaagaatatttttatgcctaaatgtcaaacgcccgggtgaggggggcacccgaacgtttgacaggcatattttagcatgtataccaggtgtctacaagataattgtttgaaaatggtttgtcaattttgtaaacgatgatttcac

SEQ ID NO: 36366 - DNA, 260 bp, Unknown
  Description of Unknown: RightRegion for integrase B10367 sequence
tctggtgtaccaatagtgatacatccgaactttcgggttacgatataccatctcgcaatctgatccggatgaaaagagagagccaccttctggtggctctcctttttgttacagctgattttccatccgttccatcagcttctggatctctctccgggtcaggtcgtccggagcttcgtccatcatctggcgcagctggtcggtcatgtctcccttcccgctgtagccgtaattgtctctgtactcgcggccgtatctcc

SEQ ID NO: 36367 - DNA, 260 bp, Unknown
  Description of Unknown: RightRegion for integrase B10368 sequence
ccacaatttttctttgtgggtcacatattcgggtttgtccttgtggtttcgaggataggttaatagcctatcctcgttttatttgtgcaatagcctgtaatactttatcatatccgcaagtagcagtaaggaacgacaggaacaccatagcgataatttctacgatgatttttcctgtaaccacttccccggtgtagattatgtaacctacgcttgcggcaatcgtgagaaccacagccacgattgaaaccaaaaggttt

SEQ ID NO: 36368 - DNA, 260 bp, Unknown
  Description of Unknown: RightRegion for integrase B10369 sequence
acgaatgcgtatatagtgttcgtaggcgggtatatcggcatagtgtgcccgcgtgaattataaccaacaaaacaaaaggccgcacagggtggttatttgccccgtagcggcccgtttttattgtttgtgggtaattatgccgttgtggtttttaattctcaaaatggcccgttttttcggctgccagtacacactcgcgtatataggcatttaaggatagccccagcgccgcggcgcgatctttccacgcgtccttcgtg

SEQ ID NO: 36369 - DNA, 260 bp, Unknown
  Description of Unknown: RightRegion for integrase B10370 sequence
agtccccgcgtcctgcacatccatgtggaatcgcttctcggggttagttctcagaccggatgatgtggtcctcggaaccaccgacgatgtgtatccaatcggtaacccgattgacccacagcatctgcttcatctccatcaggtcttcgagggtgtagcccttctgctccgggacgatgatcgtgtgcaggaagctattgatcccctcgacggcgtagctccctttgaccccgttagctagctcgcccggataggcgacc

SEQ ID NO: 36370 - DNA, 260 bp, Unknown
  Description of Unknown: RightRegion for integrase B10371 sequence
gattccattgactacggtcagcgtaaaggtgggaaggctgttctggaagtattcttgaagtaagggctatttttttagccctatgttagtatcctgtgcgctccactttaatagaactaacaggatgcatacatctatacaatccgcatcatatcagcattataagccatgacgaagcaaaagggaaggtgtcaaaaccttcccttttttgtattgacttacagaattttcagatttataatattttcagtcttttgaaa

SEQ ID NO: 36371 - DNA, 260 bp, Unknown
  Description of Unknown: RightRegion for integrase B10372 sequence
ttccaaaccctcgatttctttttccatatgacagcgagaacaaccatccaacaaaccgtatgaacgaatccgtcacactcatccccattgaactcatccgaattctgaacccgcgagccagggatcggaagaaatttgaaaaggttctcaacagcattcgaaacctcggcctgaaaaagccgatcaaggtaagcaaccggatcgtcaaagacggcgaggagccgggatacgatctggtttgcgggcagggccgcatcgag

SEQ ID NO: 36372 - DNA, 73 bp, Unknown
  Description of Unknown: RightRegion for integrase B10373 sequence
gaaggctgttcgactgagaagcaaatggtccgagtggcgagaatcgaactcacggcctcttgaaccccattca

SEQ ID NO: 36373 - DNA, 260 bp, Unknown
  Description of Unknown: RightRegion for integrase B10374 sequence
ataatatatgattatgatactggttctttaaatattattttgctaaaaacaggggtaatttaagctggtctggatgtgcagtacagttaaaacaacctctatttatatgaagtttatggaaatagataagctccagcttaattttaggctggagcttttgtttactatttctgtggttgaaaatctacttgatttaatgacattattgtaattatatctccctcatttaaatttgcagttacctgttgtactcctccttg

SEQ ID NO: 36374 - DNA, 260 bp, Unknown
  Description of Unknown: RightRegion for integrase B10375 sequence
aaagaaagttcgtctgggatgcgtctggtccgagtggcgagaatcgaactcacggcctcttgaaccccattgtgcttctctcgaaaacacaatgtacgatccgatactgcctagactcagtatcgttaaatttcaaatgtattatatcattctgtttcatttttcaacttgggtatactcctgttgtgtccgacatgaataaaatcgttcagaaaactgttgcatcgtctttccccacatggacgttagctgtatgagat

SEQ ID NO: 36375 - DNA, 260 bp, Unknown
  Description of Unknown: RightRegion for integrase B10376 sequence
atttcaagtattatatggacaaaacaaggtgacaatattgatattaaagtaaattttctataggctcgtaacagccgaagattctgtgtttcgagtggagcaagttttaaacttgccattggtgccacgtgtagaactttctccatctgaagacacttgttacgagcataaaaaataagggactatcaaaagatagtcccttaaatatttggaagtataaaatgtggtgattgagatatggtatttatattattgccgtt

SEQ ID NO: 36376 - DNA, 260 bp, Unknown
  Description of Unknown: RightRegion for integrase B10377 sequence
tggctagtgtgcgcgatgcgcggcggcttcaccctcgtggtgccctttcgcctctcgcgctaggcgaccttcagaacctggccggcgtagatcaggttcgggttggcgatcccgttggccgcggcgagcgccgacaccgtggtgccgtactccttcgcgatggagctgaggttgtcgccggacttcaccgtgtaggtcttctgcccgatgccctgcgccttgttgatggcgtccatcacctcgtcgtagcggttcgccag

SEQ ID NO: 36377 - DNA, 260 bp, Unknown
  Description of Unknown: RightRegion for integrase B10378 sequence
acgaatgcgtatatagtattcgtgggcgggtatatcggcatagtgtgcccgcgtgaattataaccaacaaaacaaaaggccgcacagggtagttgtttgccccgtagcggcccgtttttgttgttggtgggtaattatgccgttgtggtttttagttctcaaaatggcccattttttcggctgccagcacgcactcgcgtatataggcatttaaggatagccccagcgccgcggcgcgatctttccacgcgtccttcgtg

SEQ ID NO: 36378 - DNA, 260 bp, Unknown
  Description of Unknown: RightRegion for integrase B10379 sequence
tacgccaggccaaagggcggaacaattgatgatttacggctgaaaatctactatatcatgtagattttgcaaatattattcggggtatagtttcagtttgtctatgaatataaacacggaaactataccccagaaaccacaaccgccggaggaaagggaaccactcccctacctccggcaaatttttttcagttttttttgattttcctattgacataccacccattgagtggtattataatatcaacaaaagggaacac

SEQ ID NO: 36379 - DNA, 260 bp, Unknown
  Description of Unknown: RightRegion for integrase B10380 sequence
aataacaaggatgaactgataataaaacttatcggtgggcttgaattcacagagctgatataggagaaataagatgaaaaagacacgctttataccatacggatatacgatacgggatggacgaacagtaatcgttaaaaccgaagccgaagtaatacgggaaatatttaaggaatacatcaagggagcctcgctcaaagagatcgccgagatgcttactatccgaaaagttccgtatacagagaaaaccaatgtatggg

SEQ ID NO: 36380 - DNA, 260 bp, Unknown
  Description of Unknown: RightRegion for integrase B10381 sequence
tccccaaggggtggcgacgtagccccggtagagtggtcaagcaaaactgcggtcagacggtgatttcgccgctcggcaattcaatggggcctgctatcctgttgacaggaggtaacagccatgccactgacaaagtgtaaggaatgcggcaaagcgatttcatccactgcggagaaatgcccctgttgcggcgcccgggttggctccgtgctaaacaacatcaaggacacgctaagagtgatcgcagccggctttttgct

SEQ ID NO: 36381 - DNA, 260 bp, Unknown
  Description of Unknown: RightRegion for integrase B10382 sequence
aaggaaaaacaccagcgattggatgactttgaactgaaaattttcttgaagatacacagataacctgttggtgttaatgaattaacatctacaggttatctgttttgtggatactgattcggccaatatttcggccggccgcacctcacacaaatgaggatatagcgccggccgacttgcttatatctccactttcccgccgctttgcattcgcatattccattcttccatagttcggcgtcaagttcgcgttgattcat

SEQ ID NO: 36382 - DNA, 260 bp, Unknown
  Description of Unknown: RightRegion for integrase B10383 sequence
ccgaacttttcggtcttttttatagctgaagtgttcgggatgataaagcaccgggaggcataaagcccctcggtgctttgttttatataaaggagaatggcaagctaaatcttgtagagatacttgacgtctactgctccggtgacggctccgtactgattcgtagagactacggcgcggttgccgtcgagatagcggacgtagagtttttcgtgatacacgaagggaagatagggcgtattcgttccgtagacgggtgc

SEQ ID NO: 36383 - DNA, 260 bp, Unknown
  Description of Unknown: RightRegion for integrase B10384 sequence
tctaatgtcgggtttccgctatattatacagtagcgacaactataataagaaataaaaagtagcccggttacgggctacttttatttgtcctaatgtccggagttatttgtccagaactctggacacttgctacatcaccctaaccttgataccctttcattctagctagcaatatcataatatcgccacgtttgataggtgcatcaaaattcttttcatgcaccactacaccattagcatttaaaaaatcaaatgccgg

SEQ ID NO: 36384 - DNA, 260 bp, Unknown
  Description of Unknown: RightRegion for integrase B10385 sequence
tatattgcatgggaaggcaagggaaaagtgcgatacaaactgcacatccagttgcttctgtgatcgtgcgcccaaggggatgtggagacgcattattttttatgcggcatgtgtacaacaagggtatataggttcgcacacttccccaagttgtacacattcgcaaacccttgtcacacctgcattatagcatccaacagtccagtgggaaaccgctggattgtttttattatgtttcttcttcctctatcatattgagt

SEQ ID NO: 36385 - DNA, 60 bp, Unknown
  Description of Unknown: RightRegion for integrase B10386 sequence
ttaggggcaccaaaaaaagccttacggaaacgtaaggctttttccataatgattgccgct

SEQ ID NO: 36386 - DNA, 260 bp, Unknown; identical to SEQ ID NO: 36384
  Description of Unknown: RightRegion for integrase B10387 sequence

SEQ ID NO: 36387 - DNA, 260 bp, Unknown; identical to SEQ ID NO: 35841
  Description of Unknown: RightRegion for integrase B10388 sequence

SEQ ID NO: 36388 - DNA, 260 bp, Unknown
  Description of Unknown: RightRegion for integrase B10389 sequence
cttttcgtagatagacgaacagtgactgaagacgggcacgttctcttgttcatcaaggcataaaaaaagaccggtcacgaagaccggttttttgttgtttgggtacatgcggtaaaaaggtttgaaggaaaaaacccgcatgcaccctatgccaagaaaggaggactactttcggggcgtcagattgatgataattctttgattgtgtcgtcgattgctttgtcgtctttctttgtcggttctttgagcagtaacagtat

SEQ ID NO: 36389 - DNA, 260 bp, Unknown
  Description of Unknown: RightRegion for integrase B10390 sequence
gcgagccgcattgagccactgtggaacgagcaggatgaggcggcagaccgggccgaggcgtagcgaccgccccgagcctcgtcccgacgacggcccttgtaccccatctcgggtacaagggccgtcgtcgtctgtgcgtgaagcatcacactggacgttcacccgaacgtgtgtaggttgtagcgcatggcaaccaccgtcgtcggcctcatcggcctcaagcagtccggcaaggacaccttcgctcagcgcctcgtcgc

SEQ ID NO: 36390 - DNA, 260 bp, Unknown
  Description of Unknown: RightRegion for integrase B10391 sequence
tacccgactgtgcgcgggatgtttggtcttgatgcgcccagctcgctggagtccacgtgctgaaggcgtacgccgaccgggccgcactgtacctacgagcctcaaccgagcaccaaaactactcgaccgagcatcaagaggcggcgctgcaggaatacgcagtggcgcacggtttcacagtcgtgacggtgtatcgggataaggggcgcagcggtctcaccctaggcgggagggctgggctgctcgagctgctcaccgac

SEQ ID NO: 36391 - DNA, 260 bp, Unknown
  Description of Unknown: RightRegion for integrase B10392 sequence
gtgaagcgtattatttataatcgtcaagatgacaatgtggtattagaggtagagtatttataatggtgtaaatagcatctatgccaccagtggcatgtaagtcatttactgtatttaagataaaaagaaaagcccgtgtttcagggctttttggatttaattattcgggagacggtttgattaagattctctatcgcctctctagatggcttatttagttcaattacggtgaaagttattttacccatagtttacccctt

SEQ ID NO: 36392 - DNA, 260 bp, Unknown
  Description of Unknown: RightRegion for integrase B10393 sequence
atgctggcgtcatcgtgtacgtcaccagaggctgcagtagatttcatggggagactgggatgacgctgaaagaaaagattcttgaactaagcggcgagtatctgttggtccacaagtcacacatcagaaccatgcaggtgtatgacatcgctaagagcgggtatctgacccgggctgacatcatggcgatgggcagcgatatatgtcctgacgtcgagatcgtgtactccaagctcagcatggaggaccttctgaagcag

SEQ ID NO: 36393 - DNA, 260 bp, Unknown
  Description of Unknown: RightRegion for integrase B10394 sequence
cacttgttcgccccgccggctgctcgatcgcggaaatcgagcgggaaacgaaggcgaaagtgaggacgacatgggcatcgagttggaaatcgcgaacgacatcaggagcgggctctcgcaccggttcggggtgcagagcgacaggatcgacgtgcgggtgcacgaggcgagcgtggccggcagcacccgcatcgaggtgagcctcgacggggcgccgatcccggaggcgtggcggcgggtgctgcaggagcacttcgagg

SEQ ID NO: 36394 - DNA, 260 bp, Unknown
  Description of Unknown: RightRegion for integrase B10395 sequence
atagcagaactcaaaaaagttgtcaatgaagaactttatgtcaatttgaagttggttgcttaaaaattacacccgtcagaatgccctacaacgagagtttttatatgtccgaatggttttatacctccgtttttttgcataaaaaaagcccttacccgaaagtaaggacttctttttgaagaacagtaaaagagtaaaaaatgaaaaggaacttatgaaattttgaaacattgtttccggttcttatttctaacaaaaga

SEQ ID NO: 36395 - DNA, 260 bp, Unknown
  Description of Unknown: RightRegion for integrase B10396 sequence
ggttttgacgctgttccgcacgtcaggacagtgggttgcgttcaggtgaggcgggcagcgtagcatttcgggggtggctggttctactccgcagcacgaaacgcccgattggatcgacgcccgctgatctacgagccggccacgaacctctgcgcgtcgtgccattggctcacatcgaaggtgaccttctaccccgtcggcccgccggcggtgtcgttctggtgcggtcgtagccacacgaacggcgtgcctcgcgttcc

SEQ ID NO: 36396 - DNA, 260 bp, Unknown
  Description of Unknown: RightRegion for integrase B10397 sequence
atatgggataaagatggatggacaagactaccatcaacaaacaaaaaagaggaagatttttaagtcttcctcttctatatcaataagctgttctatgaagcagatctgaaagtttttgtacatccagcagggaacgaatctgacttatatccacagccatatggcaactctattgaagtcaagctagaacatcctttaaatgccattgttccaatcatgttgattgagtctggaatagttacagatgtaagattggtaca

SEQ ID NO: 36397 - DNA, 260 bp, Unknown
  Description of Unknown: RightRegion for integrase B10398 sequence
atgctggcgtcatcgtgtgcgtcaccagaggctgcagcagactttatggggagactgggatgacgcttaccaaagaggagaaactgatcaggtatcttgaggcaccaaagcctgagcaaacacaaccagctcatccctgaaaatctgaagacgaccacccaaccagaaagacccgaggtagtaacgcacctcgggtctttttttattctgcagtcccttgagacaccagttgcgaaccgtgtctgtcgtcacttcaacgc

SEQ ID NO: 36398 - DNA, 260 bp, Unknown
  Description of Unknown: RightRegion for integrase B10399 sequence
ctgctgcccggcacgctcacgcccgtgccacgctgggggaagggtctgcgatccgtgggttaggtccgttcattcccgaagatcggatcacaacacacggatagagtggctatgtgatttcgccgcagtcagcgcagatgtgatgcctgcgcttgtcccattcgctgatgtatgcccgccagttgtgacaaccacgacggcgacacgcaagatacaactgcttccgaacggactcccggtgcgcaagatcgttcagcgtc

SEQ ID NO: 36399 - DNA, 131 bp, Unknown
  Description of Unknown: RightRegion for integrase B10400 sequence
gcccccgccgaccccggcagcggtgtttgtatttcaaagcctcttctccatagacaaagataaaagcaccccggaataatctgaggtgcttttttcgtgttttagcctgagatcagcttcaaacatcgccg

SEQ ID NO: 36400 - DNA, 260 bp, Unknown
  Description of Unknown: RightRegion for integrase B10401 sequence
actgaaacaggaaaggaattcaacatcacgatttatcctaaactgtcccacaaacccttataaatcaacgggttgcatatttttatctttaatgggtatcatcacacgtaccatgtgtgattggtgtggtgatacccacataaatatgaataaataagaaaaggggtgtccaccacggacaccccttctttttagattttcttagtgtaaccaagatgaatccaaccaaccttggacttcaatcttccccaagaaccatt

SEQ ID NO: 36401 - DNA, 260 bp, Unknown
  Description of Unknown: RightRegion for integrase B10402 sequence
acgacggttcaccatcgcatacgcatcgtgaacaccttgctcggcataggcttttcacggtaaaaaaataaagcgggctttatgatgagcccgctttctatattcctctgtgccagcttccgcttgccttcgggaaagctatgccgggatgccaggtcccgttgaccttgacccacgggactccccgcttccagtgtcctgacacttttacctgcgctgttcccactttgagcgggatgtttgtctgcgtgtctgtcccg

SEQ ID NO: 36402 - DNA, 260 bp, Unknown
  Description of Unknown: RightRegion for integrase B10403 sequence
acccatcaaaagccgaacatggccattatcgggacggttctgatgttcgagatggtggcataaaattaaacccggagggttattccttccgggttgtttgttattcttccgtccagcccatctcggagaagtcgaggatgtcgccgctctcgacgaagtcgccgtcctcgtcgtaccgcgtctcctccacatagtactcggtgacgaggtagtaggcaccggccgcgccgctgtatttgctgacgtcgctcctgtaggtt

SEQ ID NO: 36403 - DNA, 203 bp, Unknown
  Description of Unknown: RightRegion for integrase B10404 sequence
ctggagacggtgggactcgaacccacgtccaaaatggaccaacacctgcttctacgtgtgtagatattaatccgctcaactgtttcgggaaaatatcacaacccttaaaacagccctaggttttatttggtggaaactctaaaccactgatggttatcttgatatgtctaccatcatcaacatactgcgtcttgcataatgga

SEQ ID NO: 36404 - DNA, 260 bp, Unknown; identical to SEQ ID NO: 36401
  Description of Unknown: RightRegion for integrase B10405 sequence

SEQ ID NO: 36405 - DNA, 260 bp, Unknown
  Description of Unknown: RightRegion for integrase B10406 sequence
gggcccgtgcgcgaggtcaggcgcaccttcgaccccgcccgcgtgctgatcacgatcccgtgacctaatctgcccgcagcggtgcccgccagggtccgttagccagtagcagcccgcccgccctcgtcgcaggcgggctgctgcgcgtcagggctgaggcgtgacgcagggatcgacgggcgactcgccgctgcagtcggcatagggcggcacggtcggctggtcgatcttcacgtgccgactcgcacacgaactcgcca

SEQ ID NO: 36406 - DNA, 260 bp, Unknown
  Description of Unknown: RightRegion for integrase B10407 sequence
ttgaatccgaacaccccgataatcattaaacattgctttgtgttttgcaaaatgtggttttaatttgtgttgaaaaacaattaacgacagtgtataatgacaatatatcgttatgtgtatagcatattgaatttattcctttctaaaaagcgtcacggcaatgacgctttttttattttcttgactaatccttgactaatccttgactaaataaaaaaagagacgcaatgcgtctctcgcctaaagaaattagaagccga

SEQ ID NO: 36407 - DNA, 260 bp, Unknown
  Description of Unknown: RightRegion for integrase B10408 sequence
gcaaagaaaatgagaggctggataaacatgccttcaacaatagaaattgaattcaagttataatatcataggtacatgggtggaacagattcttagttaccacccttgtacctgtaaaaaaacaatacatttcaatattttgtattgacaatcatatacaatgtgatataattgtattagaaagtaaataaaacaaaaaagttgtgctaacggttacgggcagaaaaaggaggattaatatgaatgaaatagaattaata

SEQ ID NO: 36408 - DNA, 260 bp, Unknown
  Description of Unknown: RightRegion for integrase B10409 sequence
aaaccgccacccgatgacgggccccggaaggttctgcggtggaaacgtcgttcgaccgtctgaagtctctcgccgagctcgcgctctacgtggtcccgatcatcggcatcgctgcggcgatggtgcgtgcctggctgcacgaccggcgataggatcgcgccccgatggcaaaagcaccgcgcgaaatgatcgtcccgcccggcggggagaagccacctccgggacgcacgaagccgatcccgcaggttcgaaagggaaag

SEQ ID NO: 36409 - DNA, 260 bp, Unknown
  Description of Unknown: RightRegion for integrase B10410 sequence
gactcaaagtatcacgctcatcaagatgtatgggtcactttgcctcaaattgccgcaagatagtttcactaattttccatttgttagttatttatgaacttctttttgattagagaagttcttttttattataccgaataatattatctatcacaccccgtaacacactcacccacgccacaacacgccctgccaccgtatcccacagcctaacacaaagagaggtgatcccatggcatacagatcctttcgagacgatg

SEQ ID NO: 36410 - DNA, 260 bp, Unknown
  Description of Unknown: RightRegion for integrase B10411 sequence
atcaagtacgagaagctgccgtggggtttccagaaggggaacgtgcgcggcaagagggcctaacggctttgcccaacctgtcctagtatcaatttgagcgtgctcgcaccgacctgtgcatggtggtgagtctcggcaccattggagccatcggggatcttcccgatgcctaccaaggaaccctgaaccatgaccaccattcgcacccgcctgcgtgtgagccacgtcgacaacctgacgttcatcgtcgatgacgacat

SEQ ID NO: 36411 - DNA, 195 bp, Unknown
  Description of Unknown: RightRegion for integrase B10412 sequence
ttacgtttgttcagtgatctagggttggaagaaaccgttctagttaacgacatctgtacataaggacatggacgagcgcctgcccaagatcaatcaaacgctgtatcgccaggtacgccgtgtgttaagctataacaagtccgtgcgtcacctgcgcggaggagaggccacccgtcggaaataccttcaccgctg

SEQ ID NO: 36412 - DNA, 260 bp, Unknown
  Description of Unknown: RightRegion for integrase B10413 sequence
atacctatttcagatgatcctttcccttggcactcaacgaaaaggggcaatactaaaaagtaagggtattacccccctcttatctcaataagtagggggtaataccactaaaaagtaatgaagaaaacttgaggttattttgaggttgtttcgaggttatttatcttaaatccgtatgtcttttacatttaagacattgccacaaattaggtttaacttctgaatgctttttcaatttacggcatgtttgacaactcatt

SEQ ID NO: 36413 - DNA, 260 bp, Unknown
  Description of Unknown: RightRegion for integrase B10414 sequence
gaatttattgagcggaagcgccgccagacgcggttccggctgcatattgacctgctgctgtgagggcgcaggtacaatgtgtacatcatgggtatgtaggttcacacacttccctatgatgtacacaccgaaaggaggtgtacactatggaaaagaaacgcatgactaccaaggaaaagttggcgctgatggatcagatcaaagagcgcaacgagcagcgccgccaggaattcgcggagcaggaagccgcgaaaaaggcc

SEQ ID NO: 36414 - DNA, 260 bp, Unknown
  Description of Unknown: RightRegion for integrase B10415 sequence
ggtggcaggtggaacgaagatgctaggtccaatttcatcatagaactttttatgaaaatataatttctatcttctatgtactaatgaataggtacataaatgttgtacattatagcataaaaaaataaggagcatttctgctccttttcttattttataatcaacttttgtcctacacttatcttattaggattgctgatgttattatcttttgctattttttgatatgttgttccatactttttagcaattccacttaa

SEQ ID NO: 36415 - DNA, 260 bp, Unknown
  Description of Unknown: RightRegion for integrase B10416 sequence
actttcagaagagttattgataaacatgtcaggaagttcagaaatggcagtctgaaggggtgattcctgggggctggtgggtttcggctttgccgcggcgcgcggaaaacaccgccatgctggcttatgttttccgctttgcgtttttccttgccgggctggtcgcctcgttttttttgattttttatctggttcacgctccgtgttctggtaaagtagaaatgaggttttccaatgccgcacggatcagaactcaagca

SEQ ID NO: 36416 - DNA, 260 bp, Unknown
  Description of Unknown: RightRegion for integrase B10417 sequence
gctagagcttttattgaaaaagttattgtatatgataacaagatagatataatatacaagtgagtatattttactattatatcttttctatcaagtaaaaacataaaaggaaaaacggcattttcaagctacataagcctttgcagttttaaacttatgaattaatttgcaaaaacacaggaattatattataccaggaggacaagcaatatgcaaacgcttttgattataacaacaataattttattttcgttggttta

SEQ ID NO: 36417 - DNA, 260 bp, Unknown
  Description of Unknown: RightRegion for integrase B10418 sequence
cctccacggaacgtgtgccatatattgccccgggcaaattacaccagattcgtcaaccgttaatcctcgcccggctccgtcggctgctgatccggctgcggatcaggatccggataatatggaacgataggctgcggctccagctgcgtttctgtcctggctgatccgccgggcagctgcccaccgtgcgccggttcgtccggttcgcccttgcgtctcatgatttcgagcgcatttttcagaatgcccggaatcggtac

SEQ ID NO: 36418 - DNA, 260 bp, Unknown; identical to SEQ ID NO: 36306
  Description of Unknown: RightRegion for integrase B10419 sequence

SEQ ID NO: 36419 - DNA, 260 bp, Unknown
  Description of Unknown: RightRegion for integrase B10420 sequence
ggatttggccattggatgaccgaacctttggtaattcccctcaccgcaaggcgcgaatcttaacgggttggcccagcctgaggcaacccacagtcgttcaggtgggcgctcccagcccctgagacgcccccggcgtaccctgccggcatggccatggcccgcaccgaccccttcaacttcgacctgtccctgcaatgggctagccgtcagcccacgttcgcctgccggcgcaccggagaccgcctggaatacctggtgga

SEQ ID NO: 36420 - DNA, 61 bp, Unknown
  Description of Unknown: RightRegion for integrase B10421 sequence
gggacgatctggtactttacaccagttttggcattgggcgagtgcccccggcgggagtcga

SEQ ID NO: 36421 - DNA, 260 bp, Unknown
  Description of Unknown: RightRegion for integrase B10422 sequence
ccacggctacgcgacactatccccgctatcaagttggctaggctgcttaagcttgcggcgtgaggtaggggcttgctctgcaaggcgtttctgctcaagcatttcataaagcataggaccaagtattttggctgcttttttggcgtctggcttatttgcagtgataaattctatttcaagcatttttatgtacctttgctcgataggtcttagttatggccatgtttatgcaatggcctttatctctaagtgcattagct

SEQ ID NO: 36422 - DNA, 260 bp, Unknown
  Description of Unknown: RightRegion for integrase B10423 sequence
gtgtatcacagcgttgggatactgccgcttaaaggcggctttggcgtgctgctcgcagcctagtaattgctgccaggcgtgctaacaaaaatgcccaccccggcagagccggagtgggcgaagcgctatttgcgactgatgaaaaggcacatggcaagcacgccaatggcggcacctagctgcgcacttaaaagtgccgtgatgatgtgacttagcatttcaaatcctaactacgctgcatagagcttgcgcttgattgc

SEQ ID NO: 36423 - DNA, 160 bp, Unknown
  Description of Unknown: RightRegion for integrase B10424 sequence
ggaaatagatgggataaagatacacaagataaattcactcttgaattagagctattcctataacatacatcataaatgttcaatagaaatggcccatgtagaaatacttggaaccatggtatatcaactaatgagcaatgcatcaatagatgaaattaaa

SEQ ID NO: 36424 - DNA, 163 bp, Unknown
  Description of Unknown: RightRegion for integrase B10425 sequence
gagtcagcctatcaggcctctatccgaaatggaatcatgtccttcgctgtggcgcgattctaggccgttagaggccttttctatttttgcggtcttgttgttcatcctccgccaaaatcgctctgaggctttaaacgagccgccacagggaaagaaacagaag

SEQ ID NO: 36425 - DNA, 260 bp, Unknown
  Description of Unknown: RightRegion for integrase B10426 sequence
tctccattttctgcagattctgaattttgcgcgaaattgcggtggcgatttccggaagtttgaaccggtattcgccttaaaggccttatcttatggccgtattgataaaattatacgccgtttacggttattttacaaggaaaatccagcctcctttgaggttccggcctttgctcaaaaagtctactaagataaggctattactgccgatacgagtaaataaataccaatgctatttaacacaaacgacaataatgcaa

SEQ ID NO: 36426 - DNA, 260 bp, Unknown
  Description of Unknown: RightRegion for integrase B10427 sequence
tatcgcaaagagaagcaccagcgaaacgatgattttaatattgagttgttccctaagttgtgatcatttacagataacctattggtgttaattcattaacataaggttcttatccgtgttgataattatcttagataatcaggccttgtatccacaagcgtccatttcccttttaaaaacatacaacggtctatatatccttcgcgctcgagttcgatcacttgtccctctctcgccttttttggtaaacgatcagcata

SEQ ID NO: 36427 - DNA, 260 bp, Unknown
  Description of Unknown: RightRegion for integrase B10428 sequence
accgtgttccatgatgggagtttggtgtttctattccgagatgggacggagataaaagtgtgagataattgcagccctgttggagaaatccggcagggctgttttttttcataactcaagtccataattgtaaaatcccagcccacagggctactttttcactccttttttctctccaaaacccacttaattttattaagtcaaatcgaaaccccttaaaaaacgccacctatcgtttgctttttgaaaaaacgccgagc

SEQ ID NO: 36428 - DNA, 260 bp, Unknown
  Description of Unknown: RightRegion for integrase B10429 sequence
tcgatcccggtgcgtggtggcgaggctgcacgactgcgcctgcgcgccgccaggaccgcgtgatgccgctctccgacgtgcagcgtgcggacatccgaggcatggccgccgagggccagagctgcaccaccatcgcggccgcgctcggcctgtccgtgggcgccgtcgctggatcgctcaacggagggaggcacaccaaggtggacgcagcgctcatcgaccgtatccggctgctcgccgacgagggcatggaccagagg

SEQ ID NO: 36429 - DNA, 260 bp, Unknown
  Description of Unknown: RightRegion for integrase B10430 sequence
cctggtttcgaccgggcctcagtcgacgtcacggcgaggtatccggggggcgagtcatgctgactaccggggaaaagctcgcccgtgccgaggcgcggcgcgtcgccgccgaggtcgcccgcgaggagcggatcgacgccatactcgccgccgccccggcgccgagccgggcactagtcgaccgggtaaccgagctactcaacgggggcgcggaatgagcggcgtcgacctcggcccctgcgcttactgcgggctgccgc

SEQ ID NO: 36430 - DNA, 199 bp, Unknown
  Description of Unknown: RightRegion for integrase B10431 sequence
tactacacccgccaaaaaggcccccactcctcaccattcaccctcgaatgtgaatacctttaaccattcttctatcccgcctactcttgtgacaaagaatgtcttgaagatatacgagtttaccttactgtgggcgaccaggaaattgttgaccgtgctgtgagcattaaagcaactactgccgaacttatctgggtaa

SEQ ID NO: 36431 - DNA, 260 bp, Unknown
  Description of Unknown: RightRegion for integrase B10432 sequence
cagagcccgaaagctgtcgccgcgttcgcggatgcaaccaagcgagcagtcgagacagtttgacgtacttccgtccgccgatctcaactcgcgataagcgatcgccgtttctcccgcgagtgctccactttcggacagtgctgacgtccaaagtcaagccgtaacgggtctggacaaacgccacgatttctttggcgctgaggagttgctccggagtttgcatcgaggggggccttatagaggacaaacgggaatgttgg

SEQ ID NO: 36432 - DNA, 61 bp, Unknown
  Description of Unknown: RightRegion for integrase B10433 sequence
cctgacaccgttataaagggatggggagaaatcaagaaagatatttatattcagagaaagg

SEQ ID NO: 36433 - DNA, 260 bp, Unknown
  Description of Unknown: RightRegion for integrase B10434 sequence
tttgttgatgaaatagtatataataaaaaatccgcaaccgttgatataacctactttttgtaggttatatctttttgaagtacggcggccctaacggcgaagcaaacgctgcgctgcgctatttgtcacaacgtttttcaatgcccaatggcattacaaaagcgactctgacagacatcggcactgaggagcttgcccatcttgagatggttggtacaataatacaccaacttgcaaaaaatgctacaacaggcgaaata

SEQ ID NO: 36434 - DNA, 62 bp, Unknown
  Description of Unknown: RightRegion for integrase B10435 sequence
agtaaaacacatttcacagtcaaatttttggatagtacatcaaaagaagtatgtattcttta

SEQ ID NO: 36435 - DNA, 260 bp, Unknown
  Description of Unknown: RightRegion for integrase B10436 sequence
cttatccgaacccgcaaaccctttgtccacgacgggtatattgtactacttatcgccgtttagtcaattcttttttaggaactccgaagaacaaaagcccttcttgccgccgccgataacgtaaagccactttacgccatcgacctcggtatagtatccataattctgtgcccgctcgccttttttcaggacggtcaggacggtcttgtttgtgcccgctcctgccctcaaacggaggccgtttggagctgtgactatat

SEQ ID NO: 36436 - DNA, 260 bp, Unknown
  Description of Unknown: RightRegion for integrase B10437 sequence
tcttctaagttttgcgacatctgcactgcaccccaacggtcaaaagcaatttctttgatgtgaaacttctgtcccagttcttcaatgaagttttcgataaaaccatagtgaaccacatttccatcagtggttttcaagtagccttgccgttcccatacatcatatggaacatggtcacgtcttactctgaggggcagtgtttcctccggcagccagaagtaaggcaaaacagaatatatctcatcatcgtctgttggagg

SEQ ID NO: 36437 - DNA, 260 bp, Unknown
  Description of Unknown: RightRegion for integrase B10438 sequence
cggtcttactctaaccctgagattatcgaaggccggatcgtgctgcgcgttttcagacaataaaaataaggcccacagccgaagccgtgagcctgataaagcagcgcaaaaaaggcaacttatgaaaaaacccggtaagagcaaacattaaacacaattatctttggaggtggggatgcagcgctgccattatccacattaatcaacattattcaacatttttcaacattattccggcacgttccaggggaccatggcac

SEQ ID NO: 36438 - DNA, 260 bp, Unknown
  Description of Unknown: RightRegion for integrase B10439 sequence
ttatcctccggtcgaacccttatctgcggatcagcggtcgtgctcatgatttctgtcgcataaaaacaaaaaacgccccggtttcccggggctgtgctatggatatggaggcgaacccccgacctaggggccatctctaaaaatggccggatataccgccggcctcggtgactgttgcaatgttgcaggatattctgttgccgtcctgcatcagcagtgcatgaacttgcgccgcacacacccggcgtcagccgtccgaa

SEQ ID NO: 36439 - DNA, 260 bp, Unknown
  Description of Unknown: RightRegion for integrase B10440 sequence
ccgaactctaaacgaacactataccgtgttggtgaatggttcgtgctgagaattgtagcataaatcccaaaacaaaaacaaggccccggatcgctccggagccttttactattatcaattattcttcttcgttttcgccctcatatatgggcggttccattggttcctttctgacctccgtgtgagctgcatcgatcaggccctcgcccaggatgtacgcaaccacgctggccgcgctcatgatcagagcggtcacctgt

SEQ ID NO: 36440 - DNA, 260 bp, Unknown
  Description of Unknown: RightRegion for integrase B10441 sequence
ccacgggagctaggaaccagccgggtcaacgtcaaggcacgcctccgcgtcgccgagcagtgagattcggtacgaccaccggccggtcgccgccccccacggtgcggcgccggccgagtgtttccggcttccattcgccgcagcccttgcagcaccgccagcagtacagcgcgaccagcccgacccgccacggcgcctccggtgcgccctgctctgcccgcccgagctgggacgcccggtcccatacctgcacctgccat

SEQ ID NO: 36441 - DNA, 260 bp, Unknown
  Description of Unknown: RightRegion for integrase B10442 sequence
agggactctaaacgaacactctaccatgccggcgattatttcattcttaagatagcagcataaaacaaaaaacacccctgaggaacatttccccaggggtatcgtattgcttatgcaatattaaattgcattaatcaattatttttgtaatttcatcaggcggttgcttttcgggtacttccggcaggccagcaaggcttgtgagtatactcagcacaaacgccacgccggaaaccgacaaggcccgcagccagtcgatt

SEQ ID NO: 36442 - DNA, 260 bp, Unknown
  Description of Unknown: RightRegion for integrase B10443 sequence
aaaaacaaatcgaacttcgtattctataaaggatattatatattctatttcaatcttgaataaaaaaaccatctctcgatggttatgcagcttacttagctgctttttttacatttaccgtaatcttgataactgtccacttttctgactcttgttcaccatcaccgtaatcctcttcagtctcagtatcaataacagttaaattatcaaaatctagtttctttaaatcttcttcaaacaattgattcccatcaacatca

SEQ ID NO: 36443 - DNA, 260 bp, Unknown
  Description of Unknown: RightRegion for integrase B10444 sequence
atatctgcccagcaggcgataagtactctcaaatatatggttgatggtgaggtttatttttgagtaataatcactttttcaaccgtgctatagtaagaaagttaggtaagtacaataaaattatctatcctgaacgaagcgtcctgagctatggttttactatagggactgccaatggatgctggcgttctcgttctagcagttcaacaatccccaatcacaaaacaattcactgataacgaactttgcacactcgcctg

SEQ ID NO: 36444 - DNA, 62 bp, Unknown
  Description of Unknown: RightRegion for integrase B10445 sequence
attttcgacatttattggacaagagaaggagataatgtaaccattgaggtaaactttattta

SEQ ID NO: 36445 - DNA, 260 bp, Unknown; identical to SEQ ID NO: 36443
  Description of Unknown: RightRegion for integrase B10446 sequence

SEQ ID NO: 36446 - DNA, 260 bp, Unknown; identical to SEQ ID NO: 36443
  Description of Unknown: RightRegion for integrase B10447 sequence

SEQ ID NO: 36447 - DNA, 260 bp, Unknown
  Description of Unknown: RightRegion for integrase B10448 sequence
atatccgcccagcaggcgataagtgctctcaaatatatggttgatggtgagatttatttctaaataatgatctcggattttaagttatgctatggtgataaagtgcaagacagaattaattatctttgacgaaacttaatgggtaattactttgtttgctcccacaagcgagttttgtacggctgtattggggtagtaaatgagctatacaatcttaatcatttgttaggtgagaactcttggtcgcagattcaaatact

SEQ ID NO: 36448 - DNA, 260 bp, Unknown
  Description of Unknown: RightRegion for integrase B10449 sequence
gcggtttttgtgtccatcacgcccactgccgacaaggtagggttacgttgtgttttgtgctgaatctaacggtgtctaatgtccgtgttcgttactgcatcaccctggcgaccgccgcgcacaattcaccgtgtctaccttgcgccaaccttcgaatcgtgctagactcgggtcatgagcctaccgccgacacgcgccgaatgggtgcggtacctgcgctggcgcgtccgtaaccgtcgacccgagcaccggccgatatc

SEQ ID NO: 36449 - DNA, 62 bp, Unknown
  Description of Unknown: RightRegion for integrase B10450 sequence
cgtacccggagggattcgaacccacgacctttggcgtcggaggccaacactctatccaactg

SEQ ID NO: 36450 - DNA, 260 bp, Unknown
  Description of Unknown: RightRegion for integrase B10451 sequence
ggtttcgaccgggcctcggtcgacgtccggttcaaggccactcccgagggcggcgcggaatgagcggcgtcgacctcggcccgtgcgcttactgtctgctgccgctagtgcccggcgtcggcgaggaggtcgagcacgcccggtcggccgggcatgacgggcgcctgcggtatttctgcccggtcgccccggacgcgctacaccatgccgagccccgtttctgcgtcgagaccgccgcgggctggcagcacctcatgcgg

SEQ ID NO: 36451 - DNA, 260 bp, Unknown
  Description of Unknown: RightRegion for integrase B10452 sequence
tatccgaaccatcccacatttttccacggcttcatcgttttggtcgttatgagagccgcctgatggtcacattgtaccacgagcggctctttttgtaaatgcttaaaaatctattgtgtcataatcaaagcatgtgcagtcttcgtcgtctatgtcacagacatgcaagcggatctcgactgtctgctttgtcctctgtgcttccactcttgcaaattcgattgcctgtcggcggcttttggtcttgaacatttcaaact

SEQ ID NO: 36452 - DNA, 126 bp, Unknown
  Description of Unknown: RightRegion for integrase B10453 sequence
ttgtcggatttcacttccaatgcaccagctttccgccgtagctctcccgaatcagattgctgatgtctttggagtagttggtgcggctgtccaccatcgtcagaagaatcccttcaatcctcagtt

SEQ ID NO: 36453 - DNA, 61 bp, Unknown
  Description of Unknown: RightRegion for integrase B10454 sequence
ttcgatctaagcgtccaaggacgcatctcggggctgctgagtaattcaacagccccggatg

SEQ ID NO: 36454 - DNA, 260 bp, Unknown
  Description of Unknown: RightRegion for integrase B10455 sequence
ggtaaaaaatgttacagttatcaaagcaaatccgaggatgacggtaacggatgcgaaggttaataagaaacttcgtgttgctgcctactgccgagtatccacggagcaggaagaacagcttaacagttttgaaaatcaggtcagttattatacggcttatattaacagcaaagcagattatgaaatggccggtatctatgcggatgaaggtatatcgggtacttcaacaaaaagacgtaaggattttaaccgcatgattg

SEQ ID NO: 36455 - DNA, 260 bp, Unknown
  Description of Unknown: RightRegion for integrase B10456 sequence
ggaaactctaaacgaacacttttccacgtatgcgattatttcgtgctgcggatcgcagcgtaattacagcagcacattatcaggcggctctgtcctggtcggctcgacctccggcagcccggtagccagcgccagcaggaccgcggtcacggcaccgaacgcgccggcactcagcacgcccatccagttcacgtcccccagcaccatggcacccgtgccgatgtacgccagggcagcctccgcaaaggtgcggaccgcgc

SEQ ID NO: 36456 - DNA, 133 bp, Unknown
  Description of Unknown: RightRegion for integrase B10457 sequence
ctaaaattaaaaaatctggagatggtgggagtcgaacccacgtccattgtggataaaaactgatatctacgagtgtagttacttattatctcgggctggcatggaaggtaacctaacctaatccagtccaaag

SEQ ID NO: 36457 - DNA, 260 bp, Unknown
  Description of Unknown: RightRegion for integrase B10458 sequence
aaagaaaagccgttaaatgacttacaaataacggctagattcataaggaaaaagaaacgttaatttaattaaaaaatattaaattttgttattaacttctttccatgcagcatatgcttcatctgatgcaaatttcatattagcaatcatcattgtgagttcgtcacgtctctttatagccatatttaattccatccaatacataatcattgctctttcagaatttgtctcaataagcttaggtgtaatttcgtactttg

SEQ ID NO: 36458 - DNA, 260 bp, Unknown
  Description of Unknown: RightRegion for integrase B10459 sequence
atcagcggacataatggcaacggtttggcgctgccagataaaaacaactccgatatccaataaggataccggagttttttatttactgtgtttctttatttattgcagcagctctgtcccggctgccggaaagtttcaacttcctgctgtcgaacagtcgccactttcggggacgcttccattattttttctctgtcagccctgcgttcatactgccgctgcggaatccggccaaatcaacggtcacgtaataaaatcca

SEQ ID NO: 36459 - DNA, 260 bp, Unknown
  Description of Unknown: RightRegion for integrase B10460 sequence
aaagaaatattatggacaagaattggtaataacgaagaaattatagatatagaatggagataattttttactttaatagacatgacaccaatgacaagtttgttaaagtaaaatttaaaataatatttttataaaaaataaaagcatcttaagatgcttttatatcttttggtaaatatttttcatccagtttattatttttaattatttctaataatatttttatactatttcttattgcttcatctgatggttcattt

SEQ ID NO: 36460 - DNA, 260 bp, Unknown
  Description of Unknown: RightRegion for integrase B10461 sequence
gttggtagtaatgcttgtccaatcataagcagtgatcttcatctatgcttaactctggactgacaaggacaaggatcccaaactattggggatcctttttatttgcccatttttaaccaattacgtgttaaatggcggacaggctacgttatttgttcaactctattcaaatatcatttatcaaactgcaccacaaacacaacaaggaggtgacacaattggagatcaaagcaaaactcaggagaagtgacagagacatc

SEQ ID NO: 36461 - DNA, 260 bp, Unknown
  Description of Unknown: RightRegion for integrase B10462 sequence
gcctctcaccccgaccatcaatactcccgacatcttataatagagatgccgagagtcgcatagacagatgaagctagagattaagttctctagctttttttattttataaagtgaaggttatttatatactttcaaattcttcactacttacctctttgtcccaagcatcaccgaattcttttttcagtaatctaagtccagattcaagtagcgcttctaactcttctggtgacaccgtcaaccctttttcattcatcat

SEQ ID NO: 36462 - DNA, 260 bp, Unknown
  Description of Unknown: RightRegion for integrase B10463 sequence
gagaactgtgtattcgacaaggacagctacacccttgcgataacctatcgcattattttgtgacccattttataggctattggagtacggcggaccagacaacaatagcctataaaaaataatgccgcagtcagatgttgactgcggcattacctattcaatgttcagacataagcctgcttttcatagaacttggctttcccctggaacagattattcagatatgtggtcttgagccaggtggcgacctgagacttctg

SEQ ID NO: 36463 - DNA, 260 bp, Unknown
  Description of Unknown: RightRegion for integrase B10464 sequence
gttgataataccacagcaaggagcagtgttcctgatattagcatatccttacgctttttgtgagtgtttgaaatgatagtttttcaagatcatcacattaaacacacacaaaacaataattaacaggagtgatgtaattatgaatcctgaaaatgtaaagcaaaatataataatatgcgccatatctattgttatatggataatggttaatatatggctattaaaatagaaaaagccctgaccatatttctaatatcggg

SEQ ID NO: 36464 - DNA, 260 bp, Unknown
  Description of Unknown: RightRegion for integrase B10465 sequence
aaatcaacgcccggcgcgctcctctcgcttgacgtcttcccggttatcaatcggctaggctagtataatcaagtatcgccttattcataagactatatatgattaaactaaaaaagcccccggcaaatcgccgggagccttcttctatcgtcgcagcttgcgtatatactcatcatgaagccgcggatttattacccgaaccgcactgaaaagctcatcgatgatcggccatacatcttcttcccgcttcccgtggattg

SEQ ID NO: 36465 - DNA, 260 bp, Unknown
  Description of Unknown: RightRegion for integrase B10466 sequence
aagtcgtttgttgaatcggtgctggtgtatgaggatggaagcatggacattcgttttttgtagtctttgtcgtactaactatgcaccgcctgtcggtactgctttgttagtacaatcaatatattgtggttatccacacagtcatcctctatatgtggacaaaataaaagcaaggcggcgcattgtccgtcttgcttctcttttactccaaaattatcgacattattcttcgatgtattcaaccagcttcggatcgccgc

SEQ ID NO: 36466 - DNA, 61 bp, Unknown
  Description of Unknown: RightRegion for integrase B10467 sequence
tctcccgtcctgcttgtacaaatacagacgaactccgtcatccttctgtacggtgtccgga

SEQ ID NO: 36467 - DNA, 260 bp, Unknown
  Description of Unknown: RightRegion for integrase B10468 sequence
gatttgagcaatcttgctccaccagcggcaatgtgccgcagcaaactcgggactacgcgttagtgctgagttttttcttttttgcccgaaggcaatcccgtcttaccgccacaaatccgcgcggtaagactcttttgaatagaatcatcccacacagaaatgctttgtttctatgtgggactttgctttttgtgggggtgaaacgaggggatttgataaatttggagagatttaggaagtttggggacaggggttcggga

SEQ ID NO: 36468 - DNA, 260 bp, Unknown
  Description of Unknown: RightRegion for integrase B10469 sequence
ctggctaagtacgagcagtatgctcacgcttcgctcgccgacatgttcgggctgaccacttgaccacctggcggcgggactcattgagccagcgcgacgttccgctgcggatgttcgagatcgactaagggtatgcgctcatcattatctattcggttgtgatttttggcgagtctgctgtattaacgcatgactaaaattcccgtagcgaggcgacgcatggtgtcgccagttctggagccatctcatgccgagcatta

SEQ ID NO: 36469 - DNA, 260 bp, Unknown
  Description of Unknown: RightRegion for integrase B10470 sequence
aaagtgtcttcaatcgtgaattacaaaacaacagaactcgaattttctattgtattagtgtaggttcgctatcttacaatcagcaactcaaggcctcgaaaaagtcggttcgctatcttacaatgaaaaataatagattttggcaaaacccctcgaactgagcattagctaatcgaactcataatcaaaattaacaaaaaacgaccaatttaggtcgtttttgtttgttttttgctacttttcagcgagtaattaaagac

SEQ ID NO: 36470 - DNA, 260 bp, Unknown
  Description of Unknown: RightRegion for integrase B10471 sequence
gggcgccgaccggtgcctgtggaggagtcgatcgagatcgactttgtgggcctggtggtgtgaatggacagagacgccccagccagacggctggggcgtctctgtgtcctcatgccctgcgtcgggcgaggcacttcgggatgatgcccgggtgggcgagcgcggaggcgaggggtccgagtacgccgacggggtcgcgtcgggcctgttcgagggtgcagtcgaggccgaacccgatgatgagcatggccagcgcctcg

SEQ ID NO: 36471 - DNA, 260 bp, Unknown
  Description of Unknown: RightRegion for integrase B10472 sequence
aaggacaatgcaacctttgagatcaggttcttggacggaacagctttcagcattcagttttgattgaatctcatgttgcacagaatgcttgaggctcgatgaaaaggcgccctacaatgggcgcttttcctcatataagggctggcgggtgccgcaataatatgatataataattgaccaacgattaacccttatattgagacgttagtacggaactattctatgaacctcccacgttaactgcgcgatacaagctttgg

SEQ ID NO: 36472 - DNA, 62 bp, Unknown
  Description of Unknown: RightRegion for integrase B10473 sequence
ggttcgcattttagcatattggtgggcccacctgggatcgaaccagggaccgaccggttatg

SEQ ID NO: 36473 - DNA, 59 bp, Unknown
  Description of Unknown: RightRegion for integrase B10474 sequence
gatagctcctcagcggattgtgctccctctgcgctggggacgctggaatatcagcggac

SEQ ID NO: 36474 - DNA, 260 bp, Unknown
  Description of Unknown: RightRegion for integrase B10475 sequence
gacctattaatcgacaaaattttggtttttcaagaccatatcgaaatcgtgtggcgcgtgtaaagttgtacgctccgcttctccgaaccgtacaaaatgaaacggctggtggtagcttttgcctataaatagacacttgaagaagtcacgagtgattatttatagacaaaaaaatagggtgcataccaagtcaattagacctaatatgcaccctataattattttttggtgaatatcttctttatcttctgccataaact

SEQ ID NO: 36475 - DNA, 260 bp, Unknown
  Description of Unknown: RightRegion for integrase B10476 sequence
gacaaagaaaagccgttagatgacttgcaaataacgattagattcataaggaaaaagaaataatataattatttatacaatgtataaattagggattattaagaaaataattcctattttttgtacttttcgtttttagaagtactattattaactatattaaatataaaaatataaaatttgaaactatgagaagaaaacaaaacaacaacttagtagcaattagatacaatgatggagatatgttatattttacttct

SEQ ID NO: 36476 - DNA, 60 bp, Unknown
  Description of Unknown: RightRegion for integrase B10477 sequence
aaaataaagcttgctccgcccttgctattgctctatgttcctctccccgcgggcatattt

SEQ ID NO: 36477 - DNA, 126 bp, Unknown
  Description of Unknown: RightRegion for integrase B10478 sequence
ctcgaaaaccccgcagtcaaaatgctgcggggttcgagtgaagattgtttggtgacccggtagggattcgaaccctagacctactgattcgtagtcagtcactctatccagctgagctaccgagtc

SEQ ID NO: 36478 - DNA, 260 bp, Unknown
  Description of Unknown: RightRegion for integrase B10479 sequence
aacaccttattttttgtgaaacactgtttcggatttgttttgattatagaggaagtaagttaggagcttgcttcctctttttctttttgtgccagcttcaactccaatacagcggactcaatgaggttttcaatttcagacgcattgagagtgtagcctttactgtgcaagaagtccaaaacgtactgcttcttctcctcacctctgccgacaccagcgtaaatcatttcagccgcttcgactgcaatgtttacccacat

SEQ ID NO: 36479 - DNA, 260 bp, Unknown; identical to SEQ ID NO: 36390
  Description of Unknown: RightRegion for integrase B10480 sequence

SEQ ID NO: 36480 - DNA, 260 bp, Unknown
  Description of Unknown: RightRegion for integrase B10481 sequence
gcgcccctccgctatcagtcgctggcacccatgttcggcaaccctttagcggagaggatatgagtgcgcccacttttggcgttgcagcactttatgtgcgcgcatccacggaacaccagaactactcgacgggccaccaagagtccgcgctgcgtgaatatgcgacccagcacgatcttgaggttgtagctgtgtaccgcgacgaggggcgcagtggactgacccttgatgggcgtagggggctactggcattgctgaac

SEQ ID NO: 36481 - DNA, 260 bp, Unknown
  Description of Unknown: RightRegion for integrase B10482 sequence
acgctgtggaactaccagcagttcgcctactcctcaatcagccagttgtttggagtgtcatgacgacctatcaggtttgatggttttctctgaaggaggccggagctaggatttcagacatatggatctctggaggaaatcatgctcaacatcatccagcgtcgtgagtcccagcagattgaggaaggtcgcagcttgggcgaaaatgcttcgatcgagcctctcatagagcgatgccgctactcgggattcataattca

SEQ ID NO: 36482 - DNA, 172 bp, Unknown
  Description of Unknown: RightRegion for integrase B10483 sequence
gaaaacagttctggcaaacccggcccttccgagtttgccagaacgtcgattggtggaggataggggagttgaacccctggcctctagaatgccattctagcgctctcccaactgagctaatcccccgacgcattacaatatagcaccgtttgcgcaggacgtcaatccgcag

SEQ ID NO: 36483 - DNA, 204 bp, Unknown
  Description of Unknown: RightRegion for integrase B10484 sequence
aagccgcatagaaaggaatatggaaaaccggaagagctggaaatacgggtcaatctgaaatagtagcaggaacatggacaatcagatccaaaaagaaatcactttatgcatatccgcatatgcatcccctgtaaatccctgtggatcgtttctttgtccgtcaatcagtcggcagacatagtagaaccctcgatgatacaggac

SEQ ID NO: 36484 - DNA, 180 bp, Unknown
  Description of Unknown: RightRegion for integrase B10485 sequence
ggttcgcatttcaaagtattggtgggcccacctgggttcgaaccagggaccgaccggttatgagccggttgctctacccctgagctataggcccacagttagtttctagcttattaattataccgaataggctagtactaagtcaaggtacaccgtatttgggttataggacaaaaagtg

SEQ ID NO: 36485 - DNA, 260 bp, Unknown
  Description of Unknown: RightRegion for integrase B10486 sequence
tccccaagggaattcggccaaatccccaggttacacgcctggcggcagctaaagatcgcctgaaagccatcccgaaaagaagaaaccccgccgaagcggggcttccatttggtgccggtacgggagtttagaccctgcccgcattatgcccccgtccacgggggccagtcaacaggcccgcttttgctccacgaaaatagtgcttgacaactatatacgcatagcgtatagtgcgaattgtagggggtgggcaggtgccg

SEQ ID NO: 36486 - DNA, 260 bp, Unknown
  Description of Unknown: RightRegion for integrase B10487 sequence
attgaattctacgcagaaccaaaaggcaaagattttcgtattaagctgtatccaaaaatataggaagtcagcgcaagcactggcttcctataaagtgtcatcttgtataccccttattcatgagggtagtacatcataacacttcctttcgctttatagcatatcacattatagacaatttattctttttggtcaagaagaaaggcagatgcatcatagcacctgcctcttttttaattcaataaacattcccatgttgc

SEQ ID NO: 36487 - DNA, 62 bp, Unknown
  Description of Unknown: RightRegion for integrase B10488 sequence
agggtttataaggataggtcaactgaggtatatctacgtgagaatccgctggccatgccata

SEQ ID NO: 36488 - DNA, 260 bp, Unknown
  Description of Unknown: RightRegion for integrase B10489 sequence
gagacagaggtccgcgacaagtggcaccctgttccgttttttctcgatatttcgctgatttgatttttcacaggtatcatatatatcattgatgcgcgtattcctctgcacaataatgatatatatgttttcaacattaaagaaagagctccccgaagggagctcaagctttcctaatatattctatcgccttcacagcatttccctgctgaagatgagagatcatgctgctcttgatctgccagacgtctgcatctaag

SEQ ID NO: 36489 - DNA, 260 bp, Unknown
  Description of Unknown: RightRegion for integrase B10490 sequence
gaaacagacatccgcgacaaatggcatcaagtgccgttctccctcgatatttcgctgatttgattatttttgtctctcatatatatcagtgatgcgctgaggaatacgcgcattaatgatatagcaaataaatagagagaaaaaactcccccgcagaatgaatctgcgggggagttttttctattggaatgcccttatataataacacagtttccaaaagacagaagtaaaagtcgaggttcacctttcttcttaagtta

SEQ ID NO: 36490 - DNA, 62 bp, Unknown
  Description of Unknown: RightRegion for integrase B10491 sequence
aagagacacttcacggtccggttcctggacgggaaggtcaaggaaatagttgtagcagaata

SEQ ID NO: 36491 - DNA, 62 bp, Unknown
  Description of Unknown: RightRegion for integrase B10492 sequence
aagagacacttcacggtccggttcctggacgggacggtcaaggaaatagttgtagcagaata

SEQ ID NO: 36492 - DNA, 260 bp, Unknown; identical to SEQ ID NO: 36165
  Description of Unknown: RightRegion for integrase B10493 sequence

SEQ ID NO: 36493 - DNA, 260 bp, Unknown
  Description of Unknown: RightRegion for integrase B10494 sequence
cccaggctgcacggtattttacctgtccctagcgaagtgtacgctgtgtcgcaacccttgtgaaagaaggtaggcctggtgataaatccacctctacttccactacggctccctccagacccacaacagcagcactttttactttggctagcatcttgataaaattcttttgtctaagtaagactcagccttcttcccttagaaaatcctcaatttttttaattagttctccattctcttcctcagatagcataaggttg

SEQ ID NO: 36494 - DNA, 260 bp, Unknown
  Description of Unknown: RightRegion for integrase B10495 sequence
cgaagcgcggacaaaaacccacgccgcctgctaagtctggacgtattcccgcgattgtattagcatgtatcgcacgttctaacatggtatatatgctaataccataaaattgttaagattctgatttcctcttgattctgtacagcttttgatgtacaattatatcaggtcaagggagaaacacaagggaggacgaaatcatgaaagacgttagaacgatggccgacaacgaactgtttgaccgccgtaacgagcttcat

SEQ ID NO: 36495 - DNA, 260 bp, Unknown; identical to SEQ ID NO: 36488
  Description of Unknown: RightRegion for integrase B10496 sequence

SEQ ID NO: 36496 - DNA, 260 bp, Unknown
  Description of Unknown: RightRegion for integrase B10497 sequence
taccgtaagcatgaatcgggtagtgatatagaacctgaattaaactttaaactcttaatttaatccgtctgcaagcatcgtgtattcgatttatcggaaactcaatgcttacagacgaaataatatggcggatagtcgaatggctacccgccttttattgtggtcagcttacccgcttccacatgaaaacagccaaatatggcggcatattattgtgagccttgccgccacctgcatacatcgtctgcacgttgccgcca

SEQ ID NO: 36497 - DNA, 260 bp, Unknown
  Description of Unknown: RightRegion for integrase B10498 sequence
ggaacctccccacaatccctccttaccctggatatattcccgcgtattggttacaacgtgtagattagcactggttgtaatgcacacgatgtaactaaaaagccctcccgaaggagggctttgttcatgttctgagcttgcgcatcacaccgtcgtaaagccggggctgtatcacctgcagtgtggacatcaactcgtccatgatgggccagatgtccgccgccttcctgccgtcaatcacccgggagaattccgtgtcg

SEQ ID NO: 36498 - DNA, 260 bp, Unknown
  Description of Unknown: RightRegion for integrase B10499 sequence
gacgctctcattgaaactattcatgtcgggcatgggaatgtgcaaattaaatggaagatttaatcatggtatgctgattgattagccttagcgattccatcagagtacaacgattttttcattcgtctcaaactaatcatttgggacgaaatacatatatcaagatgttaatttataagagcactgtaaaagtacaatgatgttataagcgaacatcttaaatgaataaaagaacaagggcgggtgtggatacatttcca

SEQ ID NO: 36499 - DNA, 60 bp, Unknown
  Description of Unknown: RightRegion for integrase B10500 sequence
aatcctgtcaagataaagagttcttatttgaacaatgtggtgatccacccgggattcgaa

SEQ ID NO: 36500 - DNA, 260 bp, Unknown
  Description of Unknown: RightRegion for integrase B10501 sequence
cggttgcccggcggcgggtacatcgaccagcgccgcctggtgatcgactggaagcggggataggccccccgttggtcagggtcggttcacgcaggaacgccccccagggtctcttggggggcgtttccgcgtgtcgactacttcttcctcggcttcaccgcgaaggcctcttcccggtgctgggggcagtagtccagccgcttgtccttctccccgtagaacgcaggcttgcgctcccggacggtggcgtccgggtcgat

SEQ ID NO: 36501 - DNA, 222 bp, Unknown; identical to SEQ ID NO: 35666
  Description of Unknown: RightRegion for integrase B10502 sequence

SEQ ID NO: 36502 - DNA, 260 bp, Unknown
  Description of Unknown: RightRegion for integrase B10503 sequence
cttaatgatgacactgaactacattactttgttaaacgctttactcccaaaagacccaaataagcagttgttattaattaattgttgttattaattgttgtgttgtttattgttatgtttaagttaatgtaatgtaagtttatttattcattagtgtgcacttattaattttgttttacatttaaaaagctgtctccgaagaggcagctttagaaaggattgtgaatcggatcaatgactcacaatcttattttaagaga

SEQ ID NO: 36503 - DNA, 59 bp, Unknown
  Description of Unknown: RightRegion for integrase B10504 sequence
attgaagaggctttgagttcggatttgacacacgacagaccaccagaaacaaaaagcac

SEQ ID NO: 36504 - DNA, 60 bp, Unknown
  Description of Unknown: RightRegion for integrase B10505 sequence
gagatgtatcgcttgttcatcgaaagaatagacgtttatccggaagaacaagatagcggg

SEQ ID NO: 36505 - DNA, 260 bp, Unknown
  Description of Unknown: RightRegion for integrase B10506 sequence
tactcgaacacttccatcccgttgatattgccgccttttattataatttacatagacctataaatcaagaaaaagcccgccagcataaagctgacgggcttctctttattcttccatgttttcgcctgctctgtggatcgcaatcgctccggctattgctccaccgatcagaggagcggccaaaactatcacaagaacggcgacggccatcatgagacgtacaccttgccctgataatacgcagcgatccagccggaagg

SEQ ID NO: 36506 - DNA, 260 bp, Unknown
  Description of Unknown: RightRegion for integrase B10507 sequence
ttaaaaaggcttttaacacccaaaaagtttctaaatgactcctggccatctaaaagaaagtagcttctctttatatgttgttgctatgtgatgtaactattttgtattttttgctctattttttttagtttttccgctcttattttcttattttttaattcgcattgccaaacaacaataactttccaaccaagatttttcaactcatgttgattttttttatctcgcacaatgtttgaatctatcttattttgccaaaa

SEQ ID NO: 36507 - DNA, 260 bp, Unknown
  Description of Unknown: RightRegion for integrase B10508 sequence
gtcgtcgaccgtgacggctccctggtccgcggcgagctgatttattactccccaccgccttgactgcctgtgtcatcatcccccgtccccctgggggcacctcccgctagacacagctttacccacctttttgtcgcacacattcgcccgtggaagaagaaaagcccctgagttcaggggctttcgtcctccatctgttctctgacgaccatccgcgtcagcaggatcgaaggcctgcgcttggggtctttcagccccag

SEQ ID NO: 36508 - DNA, 260 bp, Unknown
  Description of Unknown: RightRegion for integrase B10509 sequence
attaaaaagattagtataatggaaaccgatattaaaattgattggcataaagaagtgctctagtcttttttatattgtttgttttactcttgtgactatacaggattaatcccatatataagtaaaacaagtaacacagccatttatatgatataatagtattgggtgatacatatgaataatatatttaagaaattaatccattgttcttgcgggaagatatttaatttcaaatcagaaaatggtactccaatatatct

SEQ ID NO: 36509 - DNA, 260 bp, Unknown
  Description of Unknown: RightRegion for integrase B10510 sequence
cttgaaagttcgcttttaaatgatttggtgacccagaagggattcgaacccctggccttttgattcgtagtcaaacgctctatccagctgagctactgagtcatgtacaaggtactcacttatattaacataatgattgcggctacgcaagcattttttaatattttttgagtaattttatggacatgcggcccgaagaccgccatccaaattttggcaggggcagtaggacttgaacccacaaccaacggttttggaga

SEQ ID NO: 36510 - DNA, 260 bp, Unknown
  Description of Unknown: RightRegion for integrase B10511 sequence
ggtactcgaaccccgaagatcatcgtgctgcgggactatgtcgtcctcagaattgccgtataaagcaaaagagccccggcgggtgccggggctctcttagtctatcatgtatttgctggctgttgtgacagcgcagcaggctcccaggaatatgagagccgccacgctgatcagggcgatcatgccacgcccaggatcttcttggtcctgttcagaacgtcagcgggatccaggccggagcccttcaccttgccggcgat

SEQ ID NO: 36511 - DNA, 260 bp, Unknown
  Description of Unknown: RightRegion for integrase B10512 sequence
caggtacgcgatagctggccacctgagctaattcagcgggttacgttgaagcggatcgcgtaaatgcggccgaaaggcggcttggtcgttataaacggcgccgaaggatggcaccccccataatcgtcgcagattccaaatccggacgatatcggctggtggtcatacgttcgcggaagcgtgagttacccgacatcccgggctacgaagatgccgccgccgagtcgtcgccgaatagcctcaccgctgccaaaacctga

SEQ ID NO: 36512 - DNA, 260 bp, Unknown
  Description of Unknown: RightRegion for integrase B10513 sequence
ggtactcgaaccccgaagatcatcgtgctgcgggactatgtcgtcctcagaattgccgtataaagcaaaagagccccggcgggtgccggggctctcttagtctgtcatgtatttgctggctgttgtgaccgcgcagcaggctcccaggaatacgagagccgccacgctgatcagggcgatcatgccacgcccaggatcttcttggtcctgttcagaacgtcagcaggatccaggccggagcccttcaccctgccggcgat

SEQ ID NO: 36513 - DNA, 260 bp, Unknown
  Description of Unknown: RightRegion for integrase B10514 sequence
ttgtataacaaagagaaaaagaggtttgcacaatttactttggaagtgaaatttaagatatagttacaggtatcgtggtacagattattgtttatccgtacgatgatacctgtaaaattacctctaagaaatatattattactataattatacaataaaaggctaaggaaaataacttccctagccttattttacactataaataacatagcacataatacaccaataccaaagtatgctatacgccctgccacttctaa

SEQ ID NO: 36514 - DNA, 260 bp, Unknown
  Description of Unknown: RightRegion for integrase B10515 sequence
ggtactcgaaccccgaaaatcatcgtgctgcgggactatgtcgtcctcagaattgccgtataaagcaaaagaaccccggcgggtgccggggttcttttgctttatcatgtatttgctggcagcgccatcatgccacgcccaggatcttctcgaccctgttcagaacgtcagcaggatccaggccagagcccttcaccttgccggcgatctcctgcgccagcacgtcagcaggatccggctcggccggcttcgctgcgacg

SEQ ID NO: 36515 - DNA, 260 bp, Unknown
  Description of Unknown: RightRegion for integrase B10516 sequence
gcctgtcacacatacagtggagatgaaccgacacattacatagaacacacgattgaccgataaaaaaacctcggatggcctccggggtttttcttttttattacttttcttctttatcttcctgcttttcggcttttgcctcctggacgtcgccctttgcccgcattacttccagcaatttcagcaggatcttcggtacaggcacgcccattgtcgccacattttccaggatgctcagcccttcggatgcaataaaccat

SEQ ID NO: 36516 - DNA, 260 bp, Unknown
  Description of Unknown: RightRegion for integrase B10517 sequence
gcaggctccagaaccaaatgggatactaccccgttcaatctggagatatctttcaacttctgacatacatcataaatgggctaacgattctgcccaattatgatatatacagcaaaaactccccgaagcacggcgctccggggagtatttttttcaatctataagcccactgaactcgtggtcgtcgatcagtacgtcatcgaggtatactttcagccggtgctgcttttctgctgcgacagtctcaccggggaacttcg

SEQ ID NO: 36517 - DNA, 260 bp, Unknown
  Description of Unknown: RightRegion for integrase B10518 sequence
tattcgaacatacaggggccttgtgttgccacaaattttatcattctgcgtgtcgctgtgtaaataatgactttctgatggcgatataatcggtgcagctttcacggacgccatacgcgtctggtccggggtctttgatctagtcagtcctgcatatattctgctgctatagctattgctataacagcgctggcaactatggtaagaatgattacggtgaagataatagtcaaggccattgataacctcctattaattaa

SEQ ID NO: 36518 - DNA, 260 bp, Unknown
  Description of Unknown: RightRegion for integrase B10519 sequence
gccggcgctccacgttggttcgacccgaaccgggtcgagattgtgccgcgtaagccttcctgatccgttcgacttggagcgggccgggtgggttcttttggccctggacacggaaccgttcgcaggcttcgtcaatcgtttcgctcatgccgcgcatcgtggattaccacgctgcgtgatcgcaagatggacatgtcgcggtcttcttcgcccctcacctggatcggtatcaccccaggtggggggcttttttctgtgcc

SEQ ID NO: 36519 - DNA, 260 bp, Unknown
  Description of Unknown: RightRegion for integrase B10520 sequence
tactcgaacaccgacgagcctctaatcattccaccgtttattataatatatgcagcattatgaagcaattaaaaagagcccaccagcgagatgctgatgggcttcttcttatttctccatgtattcgccggcgagcatgacggccaaagggcctgcagacaagaccacactcaggccgccgaaggccagcaggacgatgaacaggatcaagcgacgtacacctggcccttatagtaggcagcgatccatccggaagggca

SEQ ID NO: 36520 - DNA, 260 bp, Unknown
  Description of Unknown: RightRegion for integrase B10521 sequence
cagtcgaacacccccgagctgagaataaaccacgggtttctcctcgtcaaattccacttatgagcaaatcatcagcttgatgcgtacgtatgtacgtactcaattccgcgccataagatcgactcatcgaatgattgagtcagtacttgaaaggagcctaccatggcaaccaccatcacaacgaacgagatgatcttccgcaccctcaagaccaaggtcgtcaactacaagggcgagcgcaaccccgagccgaaatacgc

SEQ ID NO: 36521 - DNA, 260 bp, Unknown
  Description of Unknown: RightRegion for integrase B10522 sequence
agctcaatagtatggaagaggacaatatgggatgaagtgagggtgactgtaaattttctttaaggggatagaccaataacgaccatatgtggaattatatacgtactgttgaatagtgtgatgcatcacactttatttagtacattattaaaaacacattgggtctatcccctcataaacattgatatataaaggttttaaagctataatagcattatcaaaagttatccacaatgtccaatttaacatgaatttaactg

SEQ ID NO: 36522 - DNA, 260 bp, Unknown
  Description of Unknown: RightRegion for integrase B10523 sequence
ggccggatgccggacggcgggtacttcgactacgaggcgatcgaaacccggtggaagcggtaaggatgcttcgggaaacgctcaattatcttgggggcgaggctgcttttccgcttcttcttccgtgaatgaacgatcgacacctgggactggccctggctcgccagtaacagtcacctcgctctgcgagatcgattgccccaagagccgcgtcaaggtattcacctgctgcctaagttcatttacttctctggtcacct

SEQ ID NO: 36523 - DNA, 260 bp, Unknown
  Description of Unknown: RightRegion for integrase B10524 sequence
gatcatccgccccgtattcatatcgtttggcgcgattcgcctagcaataacgaggaatcgtaggctgaatcagatcattcggcgtacccaccaatacaaaacagcctaagcggtcgcgtggattgcacacgaaaacgttgacaagtcgcgtactttgctatacaatatgcgtactgagatacgtgttctatctcatagattgcccccgcaatgcatcaccatcgcgagggcgagcaaccaaaggagttagccctatggtc

SEQ ID NO: 36524 - DNA, 260 bp, Unknown
  Description of Unknown: RightRegion for integrase B10525 sequence
ttgcaacgggcgggcgttcgctgctgggtcgaggatggcgaggtcgtcaagatcgagccgtgaaaactggccgaattggggtattgacaaatggaataaagtatgataatattaggccatcaagaaggatggggggggggctaacggaaatggacaaggaaagggcgcaaaaagaaatcgagcgcatttttgaacagtgctcgggcttcgaactggcattcgaggactggacgggcaccggcgaggatgatttgtgcgtg

SEQ ID NO: 36525 - DNA, 260 bp, Unknown
  Description of Unknown: RightRegion for integrase B10526 sequence
agggaagcatcaggcaaaggtaagacattaccgttccggattaccgaggttaatttcaactaatcatttactttttactacgaatgggaacccttatgtagtaaatagtacattatagatacatatgcacagcctgtggataagagagcaccttaaaggatgccctcacctttcatgaactcgttaaccttgagcaagtacttctgtgccagctcattatatttcgtgctgcctgttgccgttttataaagatcgtcaat

SEQ ID NO: 36526 - DNA, 90 bp, Unknown
  Description of Unknown: RightRegion for integrase B10527 sequence
gacacgaagtcggaggcgatccgtcagtgttcggatttgaacacgcaagcgtccgcgaggtgactcgaacacccgacctaccgcttagga

SEQ ID NO: 36527 - DNA, 260 bp, Unknown
  Description of Unknown: RightRegion for integrase B10528 sequence
gtgtggagggattgggtgctcgacacgccgcgtgtccccccaaaaggggacagccccaagtagcggacaggaccggacaacgtattgcccgagcgcaacgctgaggtctatgaatgacaggtggcaattgccacctaacgggaggactgctgatgaccgattaccgaaacccgcacccgctggcggtggcgttacagcattttttcggtgatcggctggagcggaagggactcatcgtgtgctccgtcgcgggcgagtcc

SEQ ID NO: 36528 - DNA, 260 bp, Unknown
  Description of Unknown: RightRegion for integrase B10529 sequence
gtccaatatattacttttaaaaacggactcactcatcattttgagtataaagaaaatcaataaaaaaacgcaaaaatacccatgtggtctattcttacagccacatgggttttaccatatcatatttacttatacatacggacaacctagagtataaaaactgactgttttcttcatttaaagttcattccttacaatatatttaggttttattttgtctcctatagacattacatttcttacgaaatcaattacttgtc

SEQ ID NO: 36529 - DNA, 260 bp, Unknown
  Description of Unknown: RightRegion for integrase B10530 sequence
tcacatattgaaaaagttataattactgacgaaaaaatacaaataaaattcaaacaaatatagtttacttctatgacgcttacttcatataaggacgtagaagtaaactactaggtgtataatttatttttaaatttaaactagatatagtataacacaataaaatcgtaaaaaatagggataaagcaatttaacagtttgataactgttcactttatccctataatactatatttacctatctaaaagttctggatttg

SEQ ID NO: 36530 - DNA, 61 bp, Unknown; identical to SEQ ID NO: 36214
  Description of Unknown: RightRegion for integrase B10531 sequence

SEQ ID NO: 36531 - DNA, 260 bp, Unknown
  Description of Unknown: RightRegion for integrase B10532 sequence
gatgctttgatagataagataatggttagtgatgaaagtgtggagataaattggaagatatagtttgtggcacattgactacatcgttcaatcattatagtcaatgtaccataagcgaaagaaggtcgctaataagccatttggcaaggcttttatatacttattttaatttataaattgactattttgtagcttaaaataaatatataaacgcaaaaaattaaggttataagcttttaaacttataacctcatttttta

SEQ ID NO: 36532 - DNA, 260 bp, Unknown
  Description of Unknown: RightRegion for integrase B10533 sequence
aaggcgatgattgaaaagatcttagtagcgtcagacgagatagatattcagtggaaattttagtttactttcgtgtccagtgttgatacattgcatataaaagtaaactgccctgtaacccttgtggttatggggttttaattttggcgtaaaataggcgaaaagaaaaagggctacctttcggtaacccttattgcattaagctcagcaagatgtctctaggacttgttggtgcttgaggttgaatagcagtcggtgtg

SEQ ID NO: 36533 - DNA, 260 bp, Unknown
  Description of Unknown: RightRegion for integrase B10534 sequence
ttcggggcaaagaagtatgagtttgcatttctggaaggcagcagggtaaaggtttccgtatgatcattcggaaacctcatcatcattcagaccgaataagtcaagctggctgctctggggcatctcatcatcattttcttcttctgactccggctcatccgttttcttttgtggcagcttatgtgtgtagagcttatcccacggaagcggattacggcattttttgttatagccgataaggagtgcctctgcaaatccaa

SEQ ID NO: 36534 - DNA, 260 bp, Unknown
  Description of Unknown: RightRegion for integrase B10535 sequence
aatgaactgattgaaaaaatcatcattgatgatggggatgtcttaattcattggaatttctagcttttcaggctagtttccaatgaaaaaaatttataatattttcgttacaagtcctttgcatggttttaaccatccttgtgacttgtaacggatttcagaaaggaagccgatacaaatgaagatcagaatcgaagatgggaaaacaattatttcaacaggtgtcaaagcggatgccatcaaaaacaaaacaggtgtgc

SEQ ID NO: 36535 - DNA, 260 bp, Unknown
  Description of Unknown: RightRegion for integrase B10536 sequence
gtggttaaaaaggcctatatttcggtgaatgacgtcaaagttgaaacaattgatctggtttaataccgtgaatgccgatacatcgtattttacagtgataaacccgtttacaacgcaaaaacggcggacgagcacacagcccgtccgcctttctcattaaaaatgcacgttttttatgacgtgttcgctagtttaggtataactacgcaaaaaacagcgtatttattttactctcgctcgcgtaaattgaattaagatta

SEQ ID NO: 36536 - DNA, 62 bp, Unknown
  Description of Unknown: RightRegion for integrase B10537 sequence
gaaaccagcatccgtgataaatggcacccagtaccattttctatcgagatttccttgatttg

SEQ ID NO: 36537 - DNA, 260 bp, Unknown
  Description of Unknown: RightRegion for integrase B10538 sequence
gataagaatggcaagaagcgttacagttataccagcaagaaaccgtcaggcatcggggcatagggcagtaccgcagaagaagataagggttgcagcctactgccgtgtatcaacggatcaggaagaccagctccacagttttgaagctcaggtcgattattatacgaagtacatcaatgaccatgaaaattatgaaatggccggcatctatgcggatgagggtatttcaggaaccaatacgaagaagagggagcagttca

SEQ ID NO: 36538 - DNA, 260 bp, Unknown
  Description of Unknown: RightRegion for integrase B10539 sequence
aattatataaaaatacagttaaatgcgagtataagcacaatacaaaattttaatgaattataacgtttcggtcgtactgcaaagactaatattgagtttagattggctgcccttcgttgcctccagggttgtgggctaattccgattctttcattggatgcgctcaacgaaaatattaacggatactaaattaatagtatccgttttttatttatatttttttgactttttgcctgaaaacaaaatcgcctatttgaaac

SEQ ID NO: 36539 - DNA, 260 bp, Unknown
  Description of Unknown: RightRegion for integrase B10540 sequence
atcgaacgtatcgaatttcttcgggtcggtgatgaaacggatataaatgtcgtatataaatagggacgcccgaagaaatcggacgcccttttcttttgcaatcgtttatgtaccggcgtttgtagccacccgctttcgtgaacattctttgaaacaaatgtccgtcaacgcgtgttcgtataagcaaacaaaaaacgcaaccccgatcgttgggattacgcttctttttttataagcttacgaatactttgacattcgga

SEQ ID NO: 36540 - DNA, 260 bp, Unknown
  Description of Unknown: RightRegion for integrase B10541 sequence
tgtgtacgtgagcgaacacagtttggaatcgtcacggaaataagaaaaggagctgttgcttagctcctttttcatttgtactcctttgctgtatcgtacacatctgcatcacaccatccgtctgctcctgtccactggtcaaacggctgactgcctctgcgtctctggatcaatgcacagcttatcagactcacgctgaatgccttgcagtccttttcacgctcatacttggtcaatctctgccactgcttctcagcatc

SEQ ID NO: 36541 - DNA, 61 bp, Unknown
  Description of Unknown: RightRegion for integrase B10542 sequence
accgacaatataaacgaacttgatctagaaataacatacagggttttcaatggcggaggcg

SEQ ID NO: 36542 - DNA, 260 bp, Unknown; identical to SEQ ID NO: 35603
  Description of Unknown: RightRegion for integrase B10543 sequence

SEQ ID NO: 36543 - DNA, 59 bp, Unknown
  Description of Unknown: RightRegion for integrase B10544 sequence
gacaaagccttgagcggtgcggcctccgggtgttcggataacgcttgccaagctccacc

SEQ ID NO: 36544 - DNA, 260 bp, Unknown
  Description of Unknown: RightRegion for integrase B10545 sequence
tataaaaagactgaatcaggtgcagcaatagaaccggaacttgaaatcagtctcaaaatataatctttccaccatcatgaggggatgcatttatgcacccctccatgattccagagacataattgaggcggatagctcaagtgctaccggcctttttgctatgcagtgcgtttccacatgtacacggccagatatggcggcatgttgtcgtgcgccttgttcccgccagcgtacagcgtgttgacgttgccgctgtagcc

SEQ ID NO: 36545 - DNA, 260 bp, Unknown
  Description of Unknown: RightRegion for integrase B10546 sequence
tcagatgtaaaaagcaacgggttcggatttggcgtgttagagtccaccaagaaaaagagataattttacttacagtaaaattatctcttttttattcttacttgataactccgcaggcgattttggttccggcattgccggagggttgtgtagtgaaatcgtctctatccgaatggataatcaccgttttgccgataagctcttttaccgtaaaacggttggaaagaactgccgaaaaggcataattcccacatccaagc

SEQ ID NO: 36546 - DNA, 178 bp, Unknown
  Description of Unknown: RightRegion for integrase B10547 sequence
tctatcatcgtggacgacaaaaagcaggtgaaaatcaatctaaaaataacgggcaatttgtaaagaggagctgctttgcatacctacttggtgtagaccgtagatgtcatcgacaccaaataggagtccacgccccacgcacacgctgcaaaataacacagccaacacgcacatttgg

SEQ ID NO: 36547 - DNA, 260 bp, Unknown
  Description of Unknown: RightRegion for integrase B10548 sequence
ctctcaaacatcgagggcggtgagttcgacgagggactcgtcagctccatgcagaagccttgatttttcaaggctttttttagttgaattttgaaaggtacgcaaagggtactcaaatatgcagaaaaggagaatttgaatctgttgcatacaaaaaatgaagtccacaaatggggcgcagtttagagcctgtttgtggactttttttgctatttttccgttctttttctaaaatcaaggggaataaaatcgaggaggcg

SEQ ID NO: 36548 - DNA, 260 bp, Unknown
  Description of Unknown: RightRegion for integrase B10549 sequence
accacaccattatacgcaaaagggcacatcatagtgatactgcctttgagtattaccgtctgattttcagacggtattttctttcaaaataaaaaagccgcccggaatcccggacggcttctttcattttattcgcttatagatatagagatagaataaattatcgacggtgttgcctatcagagcgaggacgaagagaacgtcaaggtttgttccgagaaccgcagcgatgatcgttccggcgatagtagctatggcat

SEQ ID NO: 36549 - DNA, 260 bp, Unknown; identical to SEQ ID NO: 36468
  Description of Unknown: RightRegion for integrase B10550 sequence

SEQ ID NO: 36550 - DNA, 60 bp, Unknown
  Description of Unknown: RightRegion for integrase B10551 sequence
actttatctgacataaataagtgttcggatattgagggtttcgctcgacgaaaacgaaga

SEQ ID NO: 36551 - DNA, 260 bp, Unknown
  Description of Unknown: RightRegion for integrase B10552 sequence
cagtgtgtacgtgaacgaacacagtttggaatcgtcacggaaataagaaaaggagcttgttagctcctttttcatttgtactgcttcgctgtatcgtacacatcagcatcacaccaaccatcagctccgcaccactggtcaaacggctgacttcctctgcgtctctggatcaatgcacagcttatcagagccaccgagaagctcttgcagtcacgctccttttcgtacttggtcagtctgctccactgcttctcagcatc

SEQ ID NO: 36552 - DNA, 260 bp, Unknown
  Description of Unknown: RightRegion for integrase B10553 sequence
gtcaccaaggctccgggcaagttcaatcccgattggctaagccccatcccccctaacgactaggcccaacctccgggctatccgttgccattgccttgcgctcaacggtgggaggccggcaacggtagcccgggccttggcaagctcatccgggcctagctccgggtagtggaggaacaaccgcctagcgtcttcgttgctcagtagctccatcacccctcccgggtaatgttccacgagagccccctgtatggccttct

SEQ ID NO: 36553 - DNA, 260 bp, Unknown
  Description of Unknown: RightRegion for integrase B10554 sequence
ggcggaagagtggacagaggcattgaccacagccggctgacacccatcttcaaggagcaatagaaatggccccctccctttcgggagggggccttcttctgtctcagcaactagcgtcgcacgcagtgcgcagcgactacttcttaatcttcacgccaaactgagcaagagccttgttgagaacgacctccgggagagtaggagcctgctgggagtactgcttgatccactcctcttggctcactcgtcctcctcatcct

SEQ ID NO: 36554 - DNA, 260 bp, Unknown
  Description of Unknown: RightRegion for integrase B10555 sequence
tcctccagcattgccaaaaccaaacggcttaaactgaagtggtccaaacgccaggctgaataatccggctaaccaccatcggcggcgagacaggccgcctggcgttcaattgtaaagcgggtttttcgaaaagcgatttgcaattgaatttataaattgacaccgcgcgcgaaataatgctatactactcgcatggtgcgcgtcacattcggcggtcacgaatatcagttgactggccgggtggccgacatcattatgtg

SEQ ID NO: 36555 - DNA, 260 bp, Unknown; identical to SEQ ID NO: 35981
  Description of Unknown: RightRegion for integrase B10556 sequence

SEQ ID NO: 36556 - DNA, 260 bp, Unknown
  Description of Unknown: RightRegion for integrase B10557 sequence
atccgactgacgacctacccggagcgcgggcggtacgacctggagatcgtgtggcgggtttaaggacgcagcattatggagccaacggtgttgttgcgtcctagaagagtcagccgccgacctggagaaactctggccgcgcggattgtggcggcgtgggtgaaggggggctagccctcccccaccaccggcagcgtcgtccggtcggcgggtggggcggcggccgggcgtgggaggtcgtgcgtgggtgcggaggcggg

SEQ ID NO: 36557 - DNA, 260 bp, Unknown
  Description of Unknown: RightRegion for integrase B10558 sequence
gggaagggcgacagcggcgggttggagctggtggcgtctgtaggcggtcccgcccccgagtagacaggaccgtcgcatcaggcggcgctgggggccggtggtccggcttccagcgagccgcgagggcgggggatgttcgggtactggttgcggccgtaggtggcggccgcggcgacgagggctatggccttgccgcagttgagggccttttcagcccacatgtagctctctccgtcaggttcgacgtcgaggacgagcgc

SEQ ID NO: 36558 - DNA, 260 bp, Unknown
  Description of Unknown: RightRegion for integrase B10559 sequence
gggctagacatcatcctgcgggaccgctccgacctgcccgaggacgcctcccctgcgaggtagttcatcacggaaccctccccctccgccgccaactaacacaggagcgcaggcgaatctggttttattgtggggtaaatgtgggttttttctgggccataaaccagaaaagacgcggcccctccggttagggagagaccgcgccagccatacccaggccagggcgtgttattcagaagacagaagccaggagacagaag

SEQ ID NO: 36559 - DNA, 62 bp, Unknown
  Description of Unknown: RightRegion for integrase B10560 sequence
aaagaaacgcaggaaatgactgttgttttgaatagtgacatatcgcttgtaaattgcaaata

SEQ ID NO: 36560 - DNA, 60 bp, Unknown
  Description of Unknown: RightRegion for integrase B10561 sequence
tctgagcaatctgcaagcggttcgcattttagcatattggtgggcaactcatacaataaa

SEQ ID NO: 36561 - DNA, 260 bp, Unknown
  Description of Unknown: RightRegion for integrase B10562 sequence
atcatttgtgaaggtttcatttgtttgtgcaaaaaaaatcagaaattcaattacagaatgtaaaaaaatcccttccggaagaaaatttccgaaagggattttaatattgtttaaatgcatttttaatggtattaaaacgggattttaatcgacaatttcccagtcttcagcgagcatgtctgcctgcgatgcaagccagccgagctgaatgccggaagtgccgacaaaagcgatagctttatttccgattgcatcgtgct

SEQ ID NO: 36562 - DNA, 260 bp, Unknown
  Description of Unknown: RightRegion for integrase B10563 sequence
aagaaaggttttagagaaaataataacagagattcctgccaagccgaaattcctagcgaataggaatataacggaaaacaataaactaagggttgccgcatactgcagagtctcaaccgataaatatgaacaagaagatagctatgaattacaatgtgctcacttcaaagaattcatagaaagcaaaccaaactggacactggtaaagatatatgccgatgaaggcaaatcgggaacacataaggcaaatagaaagaatt

SEQ ID NO: 36563 - DNA, 260 bp, Unknown
  Description of Unknown: RightRegion for integrase B10564 sequence
gacctcaccattgagttcaagatacctcgcccggaaatgagttttggttacttctcatcttaacgacattaggatacatatcgtcggtaggccagaggccgctcttcctggcggcttctgccaggtcgcacaccttgtcaatcccgaggattatgctctcgtcggtaccgataccctcgtcgttgataacctttatgttcatgagcaaggctccaggcgagacgccagccttctcagccggggcatgcatccctccggca

SEQ ID NO: 36564 - DNA, 60 bp, Unknown
  Description of Unknown: RightRegion for integrase B10565 sequence
tttcctatgtatattgatagaaatggtggagatgacgagagtcgaactcgtgtccgaaat

SEQ ID NO: 36565 - DNA, 260 bp, Unknown; identical to SEQ ID NO: 36481
  Description of Unknown: RightRegion for integrase B10566 sequence

SEQ ID NO: 36566 - DNA, 260 bp, Unknown
  Description of Unknown: RightRegion for integrase B10567 sequence
cgtgaaaaatcaaacagatatgaccaaaaacccgttctgatagacatcagacttaaattttgatcattgtatacatcttcgaggtgcttattcgtcagcacctcaatgatatacataacaaaaaaagggcagtctctcacactgcccttttaatttacttcacaaacttattaatttacttcacaaacttacgagcaaaattctcacccacaacgccattctgcgcaaagcctgccgctccgagaataccgttaacggct

SEQ ID NO: 36567 - DNA, 260 bp, Unknown
  Description of Unknown: RightRegion for integrase B10568 sequence
cagaatggggcgttgcacacgacgttccgaccggaggtctacgcgacaaccgacgaaacgtgacctcctttcctatcttgtcgcgtacgcttctaggtgcgcactatgatggttcggcggcggctacgattctccttctgcgatttgtcgctccagggcctcaatccgttcaacgtgtgcttggatcgggcgcacgccgttttcccagcggtggatattccaccaggtggtgccgaggcgcacggccagttgctgtttcg

SEQ ID NO: 36568 - DNA, 260 bp, Unknown
  Description of Unknown: RightRegion for integrase B10569 sequence
gaaggggacgccttttttaatcgagacgccccaatatcgatagacatagaatttcatgattaatcttctttcatgatgtttttaacgaacgtctttgcagggaatctattagcagtaacgttcactgagactttacttttcttcccctcgtaataagttccattgtctgttttctttgttgtaaatttgtttaattgcatttaagatacctctttcttttttatatttgtggtatcttagtgatttataaaaataaatat

SEQ ID NO: 36569 - DNA, 60 bp, Unknown
  Description of Unknown: RightRegion for integrase B10570 sequence
tgtcctacgtctggtggagatgaaccgctgcgttatgtagaacacataatacagcgtcag

SEQ ID NO: 36570 - DNA, 260 bp, Unknown
  Description of Unknown: RightRegion for integrase B10571 sequence
tcggatttggacttatcaagtccaccaaatcttatttggtctcctgcttcctgccatgcatagaatatgaaacaatgaaaaaatcaggcgcatcacacattcccacagcttctggccggtggttgcctcgctgcttctaatactggcactgctgcgcctgcccactggctgcgagtgggcgcactcataccggaacgccgaccgggtctgcgcgctggtgctgtccaccgatgagagcgatatccacgacaccggcctta

SEQ ID NO: 36571 - DNA, 260 bp, Unknown
  Description of Unknown: RightRegion for integrase B10572 sequence
acgaaggaaaagaaaaccaaaccccaggactttcaaattaccctaaccctccgccgtttttaatttacaaaaaagtaactgcatctgttaatgctgagaacaacactaacacatgcagttactttgttaatttctaaatttaagaaaatatccgcccggatttctccgagcggatacttttttattcctcattcagcagccaccggcaatgccgatcctcgcttcagttcctcctgtgcggtcattctctgcaccacgcc

SEQ ID NO: 36572 - DNA, 260 bp, Unknown
  Description of Unknown: RightRegion for integrase B10573 sequence
gacaatatcacctggaacaaagccgccaacaccctcaccatccactaccgcctcgtcctttagtcatgctcattttatggttaattgatatatggaggcccggacggcgagctcggcgcgtcgctgcgctacctctcccagcgttactccatgccctaccccgagctcaagggcctgctgaccgacatcggtacagaggaagcgtcatggaccccaattttgtcgcggtatttttccagtccgtccagcacatagaccca

SEQ ID NO: 36573 - DNA, 260 bp, Unknown
  Description of Unknown: RightRegion for integrase B10574 sequence
atgggaaaggaagataaaaatggcgagaagcattacagttataccagcgagtcagccttatagagtgggtggcaggactcagcagaaaacgagaaaccttcgggtagcggcatattgcagggtttctacagatcaggaagaacagttgaacagttttgaaaatcaagtggagtattacacaaaatatattcaggataatccattatatcagatggcaggcatttatgcagatgagggaatttcaggcacaaataccaaaa

SEQ ID NO: 36574 - DNA, 207 bp, Unknown
  Description of Unknown: RightRegion for integrase B10575 sequence
ccgtttgacgccctgttcgttttgggtgaaggggttccgagaaaacaagaatggcgtgcctgagaggattcgaacccccgacctttggatccggagaacaggacggcgagaaggatgcatggaagctccgatttcgagccatcatttccggcgcatcacgggcaggaccacctgagacgggtaggtggagttccgctcgacggtgag

SEQ ID NO: 36575 - DNA, 61 bp, Unknown
  Description of Unknown: RightRegion for integrase B10576 sequence
acgattactttatctgacataaataagtgttcggatattgagggtttcgctcggacgcggc

SEQ ID NO: 36576 - DNA, 260 bp, Unknown
  Description of Unknown: RightRegion for integrase B10577 sequence
cttggtgcaaagaaatatgagttcttctttctggaaggaagcaggataaaggtttccgtataaactattcggaaaccttattatcctgaaatccgaacaggtcaagctggctgctctgaccgtccatatccatccggtcagcatcgtcctgttccgggatatcggacggttcttcttccacggcttttttctgcgggagcttgtgggtataaagcttatcccaggtaagcggattccggctttttttgttgtagtatatc

SEQ ID NO: 36577 - DNA, 260 bp, Unknown; identical to SEQ ID NO: 36002
  Description of Unknown: RightRegion for integrase B10578 sequence

SEQ ID NO: 36578 - DNA, 260 bp, Unknown
  Description of Unknown: RightRegion for integrase B10579 sequence
cgtaatctactctttggcgaacaatatacgaacttaaacatatattatatatataataaataaataaagaggggtaatacccctcttttttagtgaattataattcattaaaagttagttctgtgctattttgtctttttctctactattaacaagtttagataatgatacacaaccctctattgcttcgctaatttgttcttctgtatatggaataccagcacccatacaccactctttgattagtgttgttgcgtatg

SEQ ID NO: 36579 - DNA, 260 bp, Unknown
  Description of Unknown: RightRegion for integrase B10580 sequence
tggcgtggcgatgccctgacgtggggtgagcgttggggcgccgaagcccgtatcgattcctgatcagcttgcttggctgcggtaggaagcagcctgcaggtacttgaggtagttgatccattcgcggcggctttcggcggagatgttgccgctttgcaggatctgcaggacttcctcgacttcggcggggagcgcatcgtctccgggggagatctcttcctcggtgaggtagccgagggcgactgcagcgcgccttggat

SEQ ID NO: 36580 - DNA, 61 bp, Unknown
  Description of Unknown: RightRegion for integrase B10581 sequence
ttccatgataaaactcttgaaagttcgcttttaaatgatttggtgacccagaagggattcg

SEQ ID NO: 36581 - DNA, 61 bp, Unknown
  Description of Unknown: RightRegion for integrase B10582 sequence
ggagaccagaacagcgttgagattcccttggagaccggagaagacccgccggatggcgggc

SEQ ID NO: 36582 - DNA, 260 bp, Unknown
  Description of Unknown: RightRegion for integrase B10583 sequence
ccacataacgcaattacagccttccaatactacgattttatctatgtttggctccggctgtaaaacgaaaaaaccgtccgaaatgggcggctttttctattttgcgttcaaaacagaaacaaaaacagaaacgaaaagcagccgccaaggttatacctgacggctgtctgaaatctatctgaaattatgcgcccggatccgccggggaatccatctgaacaaggccgttttcgcggatataatccagcattacgcccatt

SEQ ID NO: 36583 - DNA, 260 bp, Unknown
  Description of Unknown: RightRegion for integrase B10584 sequence
atccaacacaaccacaagaaacatattaaattcactcagggctggttacttattgtcgcttaaaatatacttatcgtatttatcatttttatccaatgaaaaaaatccggcagaaatcaaagctctgccggattttttattgatatttctataaaaacaacagggctattaccctgtttgaattcgcattgttcagtatttgccatgaccccggtcacttccgaaaacagtgacagcgattttcaatccccccggcagac

SEQ ID NO: 36584 - DNA, 260 bp, Unknown
  Description of Unknown: RightRegion for integrase B10585 sequence
acgatcacctaccgcgtcttcgtctcctcgtccccgcaaaccattgataccgctacattttaaccgcattgtagcctgccgccgtccgggcctcctgactccaatagacaagaaacaacgaattatcaacactttgcgggtcgcctatccctattcccctaccggactcccacaaacaacacaccgccccggagcgttttccctgctccggggcggccttcttcacttcggataatactgtgtccgcagctgcaagctgt

SEQ ID NO: 36585 - DNA, 260 bp, Unknown
  Description of Unknown: RightRegion for integrase B10586 sequence
gagacgactgtccgcggaaaatggcagaatgtcccttttgaacttgatatcgagcttttataactatcatttacatcattaatgagctaattcgtaagtacattaatgatagataagagattttcaacaaaaaagcccctccaataatcaaggaagggcttttcttaatctaatttaatttgatgcgttagcttttggcttttggagattgcctatatatcggcttttattaacttgcttataacatgctaatagacaat

SEQ ID NO: 36586 - DNA, 61 bp, Unknown
  Description of Unknown: RightRegion for integrase B10587 sequence
ggtacttttaccgtcaacgtgggcgtacatacgaatggttgcggaggcaggactcgaacct

SEQ ID NO: 36587 - DNA, 260 bp, Unknown
  Description of Unknown: RightRegion for integrase B10588 sequence
gtggtttactactgcaaaaaaacggaacctaaaagaattcgactggaaatatatttcaggtgagtgtcataagtgaacgtgccactggtgccacgtcatcttatgacaccaatttttaggttgtataggagcaaaaaaatacctgccataagagcaggtgagcgtatccctaatggtacttaacttttccctttttgatattcctcatgtaatttgatcaattcttttatataattatcaattcccttttgggatggttc

SEQ ID NO: 36588 - DNA, 260 bp, Unknown
  Description of Unknown: RightRegion for integrase B10589 sequence
tcaaatcgaacccttgccatatatcgcggcagcattcttctggtcggatccatctttcaataaaaatgggccgcggacgcatccccagcccatgtcctcaccggattccgtgccggcaaggaggtcacgtctttgattataccagaatccgactcaataaaaaaggccggagctttatgctccggtttcttttatgctgtcctatgcaggtctttggtcggaagatcatagacctttttcatccttgcctccatgtcccc

SEQ ID NO: 36589 - DNA, 260 bp, Unknown
  Description of Unknown: RightRegion for integrase B10590 sequence
ggggtattcttcttcgacggtataatggtcgcgattgcttcggcagaaaagaaaaagggctgacggatgaccgccagccctttctttatatattcgactactcatctttatgagcagcgatgtcggctcttatcagctgtttaatatatcccgacttatttggaacgctctcgagcttgtctataatatcctgctcagtagtagtgaaacaaggaagcgaatactgctttttatattttgccgcgtagcggtcctgcgga

SEQ ID NO: 36590 - DNA, 260 bp, Unknown
  Description of Unknown: RightRegion for integrase B10591 sequence
atccaacacaaccacaagaaacatatcaaattcactcagggctggcttcttatcgccgcttaaaatatacttatcgtatttatcatttttatccaatgaaaaaatccggcagaaatcaaagcactgccggatttttcattgatattccgataaaaataacagggctattaccctgtttgaattcgcattgttcagtatttgccctgaccccggtcacttccgaaaacagtgacagcgattttcaatccccctattcagga

SEQ ID NO: 36591 - DNA, 260 bp, Unknown
  Description of Unknown: RightRegion for integrase B10592 sequence
gagacgactgtccgcggaaaatggcagaatgtcccttttgaactcgatatcgagcttttataactatcatttacatcattaatgagctaattcgtaagtacattaatgatagataagagattttcaacaaaaaagcccctccaataatcaaggaagggcttttcttaatctaaattaacttgatgcgttagcttttggcttttggagattgcctatatatcggcttgtattaacttgcttataacttgctaatagacaat

SEQ ID NO: 36592 - DNA, 260 bp, Unknown
  Description of Unknown: RightRegion for integrase B10593 sequence
cgggagaagcaggcactgaaaacacagccggtactcaacgagaaacggcggataaggcagtgacagacgaaatccttgaggaagcgcgaactcgggtgctagctgatattgatgctgcgcttgcacgcgactggaacaacatccgcctgtgttccacgctcgaacgtgaacggaagatcattcttcaatccgactggcagccgagccggccaccacgccggatgccgtcactctgggccatcgcctcctactgggacgag

SEQ ID NO: 36593 - DNA, 61 bp, Unknown
  Description of Unknown: RightRegion for integrase B10594 sequence
aaggaacaggccattgaatgttcgcactcatgcgatatggtggaccaccaggggttcgaac

SEQ ID NO: 36594 - DNA, 260 bp, Unknown
  Description of Unknown: RightRegion for integrase B10595 sequence
cggaatggcccaactttgagcatttggctggtcattccgagaacagaaaaaagcacccggtgagggtgctttcttcttatcttaattattcctcgttgaagcggaattcttcttccgggtcttcgacttcctcgtcttcgggctgggccggggtctggtagcccttggaatccgtcagcccttccgcgaacagatatccgaccaccgaggccgccgccatgatgatgccggtgatcgtttcggccgtctccgcagagcct

SEQ ID NO: 36595 - DNA, 59 bp, Unknown
  Description of Unknown: RightRegion for integrase B10596 sequence
actatttcggatttggacttatcaagtccaccattacaatctaatccgaacattttttg

SEQ ID NO: 36596 - DNA, 132 bp, Unknown
  Description of Unknown: RightRegion for integrase B10597 sequence
acaaaaacgtaccgcctaaacaaaggcggcacgttgtcggatttcacttccaatgcaccatgattgaaaagcagaaaaaagagaatggcgaggcattgatctctaccgttctctttgacaacgtgagcgagg

SEQ ID NO: 36597 - DNA, 61 bp, Unknown
  Description of Unknown: RightRegion for integrase B10598 sequence
actatttcggatttagacttatcaagtccaccaaaaataaggccatctgcctttggcagat

SEQ ID NO: 36598 - DNA, 260 bp, Unknown
  Description of Unknown: RightRegion for integrase B10599 sequence
tcgcgcgtgcacctacccccgccggccaaaacaggccccaaggtctacaaagacaaaacctaggcaattcaacaacctgcctgccctgtgagcctcaaggtaaaaggccagtgtaccccagaaacaaaaatagcggcgcagtctcaaagacttgcgccgctattgtcattttttaggaacaattgctctaccaactgagctaagatggcgtgacaattatctggtaacttgctgaaagataaatgacaatcgctgttttg

SEQ ID NO: 36599 - DNA, 60 bp, Unknown
  Description of Unknown: RightRegion for integrase B10600 sequence
atcgaccttctggtaaattccgtgacggtatgggacgaacctgacggatataaaattacc

SEQ ID NO: 36600 - DNA, 61 bp, Unknown
  Description of Unknown: RightRegion for integrase B10601 sequence
caagaaaaaacgtaccgcctaccgaaaggcggtacgttgtcggatttagcactcaatccac

SEQ ID NO: 36601 - DNA, 260 bp, Unknown
  Description of Unknown: RightRegion for integrase B10602 sequence
tctaacgtggcgtggtgcgtggtggacggcgggctgctgctgagggcgccgctcgccgcatgacgaaaacgccccccgccacgtgggcgaggggcgtgcgtcacgggacgatgtggtggtgtccgcttggtgtccgcgaaaggaggaaggatgcgcgatgcccagagagagggagaggccatcgtcccggtgaagcctattctgcgggcgtttcgacgaaggccgcccacatggtgccgtaaatcgatgacgggacgtac

SEQ ID NO: 36602 - DNA, 260 bp, Unknown
  Description of Unknown: RightRegion for integrase B10603 sequence
gagtaccagaaccgcgccccggtcttcaaggacgagatcgagctgcgcatcatcatccgctagtgttgtcacctctacccgctagctcgtttgcgggtacatgtgacagcacagcattgagctgggaatacaatacgcccgccgagccgaggcccgacgggcgtctgcgacgtatgacgcgggacgccgcaacccgctcgaaccaaggcgtctagcaccgccctgtacacatgtggcggagcgccgaggattcgaacctc

SEQ ID NO: 36603 - DNA, 244 bp, Unknown
  Description of Unknown: RightRegion for integrase B10604 sequence
cctcgaaccgaggtgtgcgcaatcggcacgattatcttcgttaggataccacgagcggcctaggaaacaaccaggcgcatgccgggatagatcagattcgggtttgagatgccgttcttggcggcgagatcctgataggtcgtgccgtactttgaggcgattccggaaagggtgtcgccgctttgcaccacgtacacctgctcggtttcggcctgcccgttgatgaccgccataacctcgtcgt

SEQ ID NO: 36604 - DNA, 260 bp, Unknown
  Description of Unknown: RightRegion for integrase B10605 sequence
cccggcgctaaatgggcggtagtgcccggggcgctgctattgagggtagagctcgcggcctagaccagcgacgatgcgtagacggcgatgccctcgcggccgccgtcgacgaactccacggcgaagccgcgcccctggagggccagcgcagccgcgcgggcgttggcgttggccatcctccagtccccggcgacgcccagggccgagtcggtcgacttctcgaggtagctctcggcgtccggccagtagggtatccagat

SEQ ID NO: 36605 - DNA, 260 bp, Unknown
  Description of Unknown: RightRegion for integrase B10606 sequence
tggaaagagaagaagaccaagcccacggatttccgcctggatgtacagatcaagccgaattagggggtagtggttaaaaggcgttatatcttacgataaagatataacgccttttaaccactcaagtccccctcaaaaaatctcccccaaatcctcaaaaacctcttgacatttacacgcgttgcgtgtatactataaccaagctaagagatcaccccaccgacaaaaggaggacaacgatatgaagatcaacacccacg

SEQ ID NO: 36606 - DNA, 260 bp, Unknown
  Description of Unknown: RightRegion for integrase B10607 sequence
agaaagttaattaaagaaattgtagttgtggatgctgaaacagtttatatttacacgtactaggtcgccgtatggggcgaccttttgacatcaaaatttcgtttttgatatcaaaagggtacgtcatggagttatttaggaacgaatgtttggtttggcaataaaaagaaaagcccaaaagggctatttatttaacaattttaacatctgatggttcagcactcatgccaggaatggtaatatttgcgccaattgtactt

SEQ ID NO: 36607 - DNA, 260 bp, Unknown
  Description of Unknown: RightRegion for integrase B10608 sequence
acgggagtgtggcgggaccgggtaatcatcatcccgagctgggaagcacctactgtcggttagcggcatacgtcgtgcatcgtgtatcacaaaccgctatcacgcctctgcacttatatgagcacgcacaccatcaccgaagcgaccacgtgcgccgagtgcgacatcccgatcgtcgacgtcgacggtcacgcccgatggcacgccgagctgcacaccgaagcgtccggccgctcccgcatcaacgcccccgcgctcct

SEQ ID NO: 36608 - DNA, 260 bp, Unknown
  Description of Unknown: RightRegion for integrase B10609 sequence
gcaaaaagtatgatcgaccgggtggttttgagtgaggatggcgtggatgttcggttcaaataaaaaagaggaaaacaaccgtttttcctcttttctttttctttcctatgtatccacacctgaaacaaaaatacttcccgtaattctggcattttatatattgacattgagcaaacattcctttattttatggtagggggaggtttccctcccctgttctcataccagctctctgataatttctatcaggacttctatga

SEQ ID NO: 36609 - DNA, 260 bp, Unknown
  Description of Unknown: RightRegion for integrase B10610 sequence
gagatccttcccgggccggtgttcggcgcggccgccccggctgcgccgctgaccgtcccgtagccccggatcaagggcgcaccggctggcacgtgccgtccggggccgtctgtcccggcgacccggccaccgtgcagtacgtgccgttcccgtcgtagcggccttgcagcaggagcccggccgtgatcatcgcggccacggcagcgcaggccaggagcacgagcacgggatgccggaatcgcgtcatgagtgctgcctgt

SEQ ID NO: 36610 - DNA, 260 bp, Unknown; identical to SEQ ID NO: 35873
  Description of Unknown: RightRegion for integrase B10611 sequence

SEQ ID NO: 36611 - DNA, 260 bp, Unknown
  Description of Unknown: RightRegion for integrase B10612 sequence
acgcttatctcgtttatagagatcgataacgaggatatttatatccactggaaatttgcataaaaatacaaaaaagaggatcccgaaagtcgggacctcttttctataggatttaaagttttcgtaattcctggtagactctgcttatcggtaaacccattacgttataatagtctccggtaataccctttataaatttagcgaacgtcccctggatcgcgtaaccgccggctttatccgcccactccggagccttttta

SEQ ID NO: 36612 - DNA, 260 bp, Unknown
  Description of Unknown: RightRegion for integrase B10613 sequence
agtcgaacccaggtactggcgctcgggcgctccgtgttcatcaggttttctcgggccgcctaaaatagcaactactgaaaaaggggaggccccgcgaggagcctccccttttttgttttggctatccaaccaccagcacttggccggggtagatcacgttcgggttcgccagcccgttcgccttggccagcgtccggtagtccgtgccgtacttggcggcgatgccagagagcgtgtcgccgctcttgaccgtgtaggtc

SEQ ID NO: 36613 - DNA, 260 bp, Unknown
  Description of Unknown: RightRegion for integrase B10614 sequence
ccggagccatacaaaccatcaaccagaaagccccgcgctacaaaccgcaacacagcgaaataacatcacttttaatacttcatcaaaaaagaccaaaaaccatttgtagccacaaaaacaaaaaaaaccaacaacttaaagtagttgatggctttatgatctaaatcgagctctcacgctctaccaactgagctaagagggaagatcatgtgtccgctaagtgttagcctttactgcttttttaactgttttttggctac

SEQ ID NO: 36614 - DNA, 260 bp, Unknown
  Description of Unknown: RightRegion for integrase B10615 sequence
aagatttttataaaacaggtcgttcttcgcgacggtgagattgaaattaaatttataatttaggagtggtgaaccgcatgattatttacgtctgttccgcatacagcggaatcccgggattaaacgacaaccgggaggaaaatataaaggctgcggaggatatctgccggtttattatgaaaaaaggttatacaccgtttgccccgcacctgctttatacgcgcttcaccgacgacgaccgtcccgatcagcgcaaggcc

SEQ ID NO: 36615 - DNA, 260 bp, Unknown
  Description of Unknown: RightRegion for integrase B10616 sequence
tctaacgtgttgtggctggtcgagggcacgacggtcatgctgcgcgtgccgctggcggcgtgacgcccccgccggagcgggggcgcgtcgcactcgtggcgtcagcggcgatggggggtggcgtgccgccgatggctgggaaggttgcgaaggccagcacgcgccacggtgccgtcagatgatgagggccccaatcgcgagcccgacgaacaggccgatgaggaagagcagcgtctgcctgtccgcacgctcctcgatgc

SEQ ID NO: 36616 - DNA, 260 bp, Unknown
  Description of Unknown: RightRegion for integrase B10617 sequence
gagaaagcactcaaaaagaatgcctcccacaatgtcgatttaaagctattccctcgaatatgataaggttaaggaactgattcctctgttccttaaccttatcatattcatttaactcactttgattgaaaaatacagatttctttcatattttatagaattcaaacttttcacattttctaaatataaatttactattaacccatcttgccatacgtttagttaactctggtgcattccatttttcaaatatcataata

SEQ ID NO: 36617 - DNA, 260 bp, Unknown
  Description of Unknown: RightRegion for integrase B10618 sequence
gttaaactcccaccgatctcacgcggcacccgcaaaggcctcgccccccgttacaaggcctaagtccgcgatttaaaagactttcgcccacaaaccaaaaaccgccccgtaacgcaaaaaataaaaaaggccagcaaccttgaatggttgctggccgtattctcttttccacgctcacccgctctaccaactgagctatcggggaagagaatagtttttctaactcgccgtttttacgagatgaaaaactattttgccgt

SEQ ID NO: 36618 - DNA, 260 bp, Unknown
  Description of Unknown: RightRegion for integrase B10619 sequence
ggcaccgccaccgcaaaaatcaacctgcctgcaacacaccgtggaaaaaggatcgacaaatagaaaaagcccgcaagcgggctttaagttgttaacggtttgttcacctgctctaccgactgagctaatggggaaagaggttttccagctgacgccctgtttatgtggcttgaaaggtgtttttgctctgcaaatacgccttaaaaacctgctaaaacccgtgcatcaacgaggtgggtttatagcatgttattttttat

SEQ ID NO: 36619 - DNA, 260 bp, Unknown
  Description of Unknown: RightRegion for integrase B10620 sequence
atattttttagaaagatagaaataatccctcaaaagaatactgaaacaactatgagcttttaaaagaaaagccctcctttaaccaggagggcttttctaatgagtcgggatgacatgattcgaacatgcgacctcacggtcccgaaccgtgcgctctagccaagctgagctacatcccggggaatggtgtctatcgggtgcaaatgctctaccaagtcaacccaatagacacctaaagatcccttgttttgtgccgcttc

SEQ ID NO: 36620 - DNA, 260 bp, Unknown
  Description of Unknown: RightRegion for integrase B10621 sequence
tccgcgatcggcgtctgggaggacccgagcaccgatgagtggctggcttcaagaccagcgtaatagtgaccaatcactgacatgaacgctgcgattgcctggtctttagagacaactgtcacgtcctccttgcgtgttcgaggggccgtggatgcggtctgcttcaaccccgaaagagtgaagatcccctgaccgtgaagcttgatcgctacactgcggccatgactcgtactcaggggtaccctcacagcaggctgctc

SEQ ID NO: 36621 - DNA, 260 bp, Unknown
  Description of Unknown: RightRegion for integrase B10622 sequence
gacaagattatctacgatcgcaaaaacgattctctcaaaatctactttttcttatacaggtaaaatgcccgcaaaccaagtaaaatcaagagtttgcgtgtactttataggttatgacaatttggttgacctttttgtcataacctataaagtggatttttacctatttatatttataatgctatcctacatatgtcttaccactatattgatggaatctttattttttcatccgaccatccgcttcaaaataatattct

SEQ ID NO: 36622 - DNA, 260 bp, Unknown; identical to SEQ ID NO: 36035
  Description of Unknown: RightRegion for integrase B10623 sequence

SEQ ID NO: 36623 - DNA, 62 bp, Unknown
  Description of Unknown: RightRegion for integrase B10624 sequence
gaccacatcgtgtttgaccgcggaaacacaagtctcgatatgttcctaaagcttgtaattta

SEQ ID NO: 36624 - DNA, 214 bp, Unknown
  Description of Unknown: RightRegion for integrase B10625 sequence
gacaagattatctacgatcgcaagaacgattctcttaaaatctactttttcctatacaggtaaaatgcccgcaagcccagtaaaatcaagggtttgcgggtgctttataggttgtgacaatttggttgaccgtttgtctttaaaatgtaccctatagattagacagtttgagtttttaaaacccttaccattggacagtaagttttaatgaaaa

SEQ ID NO: 36625 - DNA, 62 bp, Unknown
  Description of Unknown: RightRegion for integrase B10626 sequence
gaccacatcgtgtttgaccgcggaaatacaagtctcgatatgttcctaaagcttgtaattta

SEQ ID NO: 36626 - DNA, 260 bp, Unknown
  Description of Unknown: RightRegion for integrase B10627 sequence
gcgcgggtcgaggtttggaacggcgaaccgatcccgaggatctacccacgcttcttcgagtgactgctaacggctacatcgttgacgtgacatggccgttggcgcgccgaccgttcccgaacaccagtgctgtatagctgcctaggcgctatcaccgaacgcttgacggggcagcgttctggggcgagatttgtcgctagacgcacgaacgccccggaggtcgcagtccggggcgctcgcttcggtcaccggctacgagg

SEQ ID NO: 36627 - DNA, 260 bp, Unknown
  Description of Unknown: RightRegion for integrase B10628 sequence
attgtaggaatgtcaaacctcgcaaccataaacaacaagccgtgcataatattagccgcgtgaaaaaaatagaggagtgccgttatggcactcctcttcatagtatgacgggcatgccgtcagtctgtggtgaaagtccacgaggggcgtagttgccgacgaaccccaaagcgactcccaaggtttgtatcgtgaggtgcaggcgagaagaagggatagcgaaatcgtagcctgacgaacaggaacctgatacaaggcgt

SEQ ID NO: 36628 - DNA, 60 bp, Unknown
  Description of Unknown: RightRegion for integrase B10629 sequence
tccgtaccagacgagtgttcgcttagtacggtcaagtggacttgcggaaactctaaacga

SEQ ID NO: 36629 - DNA, 260 bp, Unknown
  Description of Unknown: RightRegion for integrase B10630 sequence
atatccgcccagcaggcgataagtgctctcaaatatatggttgatggtgaggtttatttttgagtaataatcactttttcaaccgtgctatggtatgaaagtaaagtaactactatgatattaactatcgagcaagaatatccccaggcactcaacagggcgcaggtcaacgtgaatcggtcatgacacgacaccgattttgcggaatcaatgttgcttatgaatacaacatcccgcttagtacatgttcaacacatcag

SEQ ID NO: 36630 - DNA, 260 bp, Unknown
  Description of Unknown: RightRegion for integrase B10631 sequence
atctcgccagagcttcgagacttgttacccagccatcttcagtttgccatcgctcaagcttaacgcggtggccaaacctgttgcgtcttccaacggtgcaaagtctttgcaccctcttgtatttcatgcctaggacttcacccaatcgaagatttccatctgcatccatgttgctatttttctaccccataagtggtatgacgcgacacgatgtcgtaccaggcccccgaaagagtgggtcacagagtactccgtgacga

SEQ ID NO: 36631 - DNA, 260 bp, Unknown
  Description of Unknown: RightRegion for integrase B10632 sequence
  modified_base (138)..(237): a, c, t, g, unknown or other
attgaagatatcgtatatgataagaaaaatgggcaaatgatttttactctttacatctcgtaaccccttgaaatacaagggcttacgggtatgttataggttattgcaattcggaggcccatattgttgtaacctatnnnnnnnnnnnnnnnnnnnnnnnnnnnnnnnnnnnnnnnnnnnnnnnnnnnnnnnnnnnnnnnnnnnnnnnnnnnnnnnnnnnnnnnnnnnnnnnnnnnnaatatataaataggaaatttcaa

SEQ ID NO: 36632 - DNA, 260 bp, Unknown
  Description of Unknown: RightRegion for integrase B10633 sequence
tctctaatttattacatcgaattagataacgacgacgtttatatttattggaaatttgcataaaaaaagaggctctccattcctggagagtcttttttatattgcttttatttcttttaacatttgatacagacggctaaccggtaaacccattacgttaaaataatcgccgtttattcgctcaacggctaacataccaaaaggctcttgaatcccataaccgccggctttatccctccaattaccgaggcttttctctg

SEQ ID NO: 36633 - DNA, 260 bp, Unknown
  Description of Unknown: RightRegion for integrase B10634 sequence
aacactgaaaaggtcctcttggatttaccctacgcgctgttgtgggtagaatccatttgttaagacgtttatgagggacgttattaacacccctcattatagaccaggtgtggtacctttgtctatacatgcaaaaagagcgccccggatgttgcatccaaaggcgctctttaaggaagatttgacctcgtggcagacgtgggtcaaaactatttgggcggaatctttaacacctgtcccgaacggatcacgttattctt

SEQ ID NO: 36634 - DNA, 260 bp, Unknown
  Description of Unknown: RightRegion for integrase B10635 sequence
gaatataaacgtgaaaaatccgctcccgagggcgatattttcttgaaaatctattataaataacttttacccgccttatgtatcttgttgccatagatgtcgccatagcaatccataatattccggaaggaattgctacgtctgtaccgatatactactcaacaggcagcagaaaaagagcatttatagtatcgtttttttcgggtattacggaacctttaggtgctataatcggttatttaattttacgtccgtttttc

SEQ ID NO: 36635 - DNA, 260 bp, Unknown
  Description of Unknown: RightRegion for integrase B10636 sequence
gtcacggttgaggggtcgcgtgaatggcgggtcaagtggcgcctactcgtttgtccacggtaggcacggtgaacacggcgacgaccgtaggcaagcaaggggccccggtggtgagccggggcctgggtagtaggctagtcggggaaatcctgttggtccgctcctggagtgcactcgtaatgccggggcctggagtcggcgaacgacgcgtaccaaggtgcgttcacgatgattgctccgcaaacggcgcagcgagggac

SEQ ID NO: 36636 - DNA, 260 bp, Unknown
  Description of Unknown: RightRegion for integrase B10637 sequence
gaatataaacgtgaaaaatccgctcccgagggcgatattttcttaaaaatctattataaataactttttacccaccttatgtatcttgttgccatagctgtatagataacaacaagatacccaaccaaaaaagaacataagtattttgcctatgttcttttctaattatatacacatactatttatcacgaacttcaaaaattaaatctcctggctttatatgctctgtatttttatcattttttgatattatatgtatt

SEQ ID NO: 36637 - DNA, 260 bp, Unknown
  Description of Unknown: RightRegion for integrase B10638 sequence
tctagaaccgagatctgcgccgttgggaccgtcgtgctgctcaggataccacgggcggcgtagcaacaccttttctcgagaaaaaacccgcccgggataacccgagcgggccgcggctagcgcccgttgatgctcacgaggcacaggccgattgtcgccacggtgccgccgaagagcgcgccgaggacgaaagccagcgcgatcatgctagtacgggttgccgtcggtgacgcagacttggagtcggtcgagcggctcgc

SEQ ID NO: 36638 - DNA, 260 bp, Unknown
  Description of Unknown: RightRegion for integrase B10639 sequence
gatgtcccgtcgccgcttcccggtgttgatggctggtcgcagttgacgcctattcggtcgtagcgctcggcgaccatggctctgaggtgggctgccatgctgggtgtctcccctctgtttcaaatgggacttgtctcaaagtgtgcagtggtggccatgatcgacccatggccaccactgtcgttgttgacccatcagtgcctgccgcgactcgcagagccgttgacgaacagttctgccgtgacctagctcgtcgccat

SEQ ID NO: 36639 - DNA, 260 bp, Unknown
  Description of Unknown: RightRegion for integrase B10640 sequence
ccatacgacttcccaccgccactgggggtgccgctgggtcatgatggcgaccagggcacgtgacaggccttccttagcttccggagtcacccctccccctcccgctgcatcgactccaagatctgcaggtaaccgacgatgtccaggcgggtgtcctcaatcaggagtgccgggtctctcgccagcttcgcgtggatcatgaggcgcggatagtcctcgggctcgacctcgacgccgagtgcgtcctgcgccgaccgggc

SEQ ID NO: 36640 - DNA, 260 bp, Unknown
  Description of Unknown: RightRegion for integrase B10641 sequence
gaggtgaacaagcagggtgaattctttatcgctattactttgcctgattctatcgaaatttagcaaacgggaaaccttccgacaatttcaaaatagggaaggtttcccgtttgcggttttatatctttccttcatataataaggatttcaagagttctattccgtcattgaatccctgcttatatgtattttccagaagagcatccactcttgatgttgataattcttcatagcgatcaaaaatatttctttccttaccc

SEQ ID NO: 36641 - DNA, 260 bp, Unknown
  Description of Unknown: RightRegion for integrase B10642 sequence
gcactgattgaaagaattgacattgactgtaatgatgtcacaatacattggaatttcatataaaaaaggcacaccatccagcatgccttaaaaaattatgacttgaataccatgttgaacagtttgctttagcgaattgcacaacatggtatttgtttttttagctttcttccggcactgacttataaaccacgaatgtcacacttacaccggcttcttcaattggtgtttccaagttcacagtattgtttgtaatggtg

SEQ ID NO: 36642 - DNA, 260 bp, Unknown
  Description of Unknown: RightRegion for integrase B10643 sequence
ttacctgtaagcgaaacggaaataaaaagttcctctatcataagaagaacaatgtttttttaatggtggggatagccagatttgaactgacgacctctacacccccagtgtagcgttctaccaagctgaactatatccccatttactttaatataaaagggtggattggacaggctcgcacctgcaaaccattacaatccacccctttcttataaaaaacaagcctatataataggaagaaactcattttaaatcattat

SEQ ID NO: 36643 - DNA, 260 bp, Unknown
  Description of Unknown: RightRegion for integrase B10644 sequence
gagggtggtcgtgggctcagcccggacaccctccgaatcgaaccaaagaaaggtgggtcatgaagacgttatttgaggatctagaggcgctagaggtgatggtggcgttgagagagagggaggtccagcaggctcaggaagctcttgacgctgccctgaaccgttacggccaggcaatcgctcgccgtactacggcccaccttgagggcagggtagttggccatgagccaggttcctgagcgccgatccgagggcgtttc

SEQ ID NO: 36644 - DNA, 260 bp, Unknown
  Description of Unknown: RightRegion for integrase B10645 sequence
actgtaaaaatgtgcagaaacaagaaattttccgaccttaccttaaaggttgattttttatgatataaatgtacaacatatataccttataaaattacaatatctttcttgtacatataaaaaatatccctctgcctgaattaaatcagacagagggattttctttacttttcggtaagtgtaccggaatatgtctcaccatcaatagtaagagtaacagagacagacttcgtacttttggcagcgtttttatttctgct

SEQ ID NO: 36645 - DNA, 260 bp, Unknown
  Description of Unknown: RightRegion for integrase B10646 sequence
cagaacgccggcctgcgcgtcgagatcgaggccggcgccatcacctccatccgccttgtgtaatcccagtcaccacagcatactggtgccgtagccactacaactacacgaattgattcctgagccagtctacttccacccggttcgacgccgccacactcggattctccccgaacacccccgcccggcctgccaccggtgcccacgccaccgcgttgctcatattcatgctcaccgtcgaaccatcctccgctaatatg

SEQ ID NO: 36646 - DNA, 260 bp, Unknown
  Description of Unknown: RightRegion for integrase B10647 sequence
cgagtggacgaaacgcacaaaaacgggaaatatgatattaggtttttaattcacttcatataatgtgattgcaggatgcgcttttagtagttcgtttccgtccgtcattttgatagccgatgcaaagaaactactaaaatgaaaagtcccggatttctccgaggctccccagcggcctccgcaaagtgccgccgcaattgcttatattatagcacgttcaccgcgaaacggcaacgccaacagcgacaaggcataatact

SEQ ID NO: 36647 - DNA, 156 bp, Unknown
  Description of Unknown: RightRegion for integrase B10648 sequence
gacaaagcagaagtacaatttacgatatttgaaaatgtcgttagtttacatggcggagagtgaggggttcgaaccctcgccgcccttacggacgctaaacgtttagcaaacgttccccttaaccacttgggtaactctccatatacaaatttctcg

SEQ ID NO: 36648 - DNA, 260 bp, Unknown
  Description of Unknown: RightRegion for integrase B10649 sequence
gcccgacttgataacaactatggccataactatgacctcgacttgaaaatatcgttcaaataaaaagagcccatctgcgtagatgggcttgtttgttatatgcagaagttgtctgtatcggtaacctatgtcaagcggctaccgattaaaactacttcttatcgagtaccacgggtcctttgttcgatttcctcttcatgcgcgcggacgtatttttctacggcggattttatacaatccgaaacggattcaggatagat

SEQ ID NO: 36649 - DNA, 260 bp, Unknown
  Description of Unknown: RightRegion for integrase B10650 sequence
tcatgcagccttacccaaaacataattatccacgaaaaaggctggctgattataccagcataaaaaacaagggtctcctgcctgagcagagagacccttaatttttgtacagaaatttctgaaattctatttaaggaaactgaaaccgtttcagaaatagctaatctcaatcctcggtgagcagtccgctgtaggtgtggtcatcgaccgtcagagccactttcacggactttttcgccgccgaagctgagccaggacga

SEQ ID NO: 36650 - DNA, 260 bp, Unknown
  Description of Unknown: RightRegion for integrase B10651 sequence
gacacttcgaagtatatttatatatattctgcatttgaaatagaaaaaagagcctttagttaggctcttttatatataatttaatagtgtttctaattgcgttttgctgacactttgtgatctaacatatggttcaaggttcatagttgtatagtcttgtgcatatcctagataacccatgatgagcgctttttgttgaactgtcagccccatacgatttagcatcattttgattttgatcttcttagaaccattcacaa

SEQ ID NO: 36651 - DNA, 260 bp, Unknown
  Description of Unknown: RightRegion for integrase B10652 sequence
gtccaaggccgcaccagcgttagctgttttggcttgggggctgataaaccggaagctcgttagccacctgctcggtcaccagtagtgcagcagaaggcgcgtactcttcctcccacatgttgttttccataggccctccatccttacggattgatcttagccacagagaaccaggacacagtcccggtgctctctccgcctacgttgacggcgacaggagccggggtgccagccaggttctgcgaccacaagccgggtgc

SEQ ID NO: 36652 - DNA, 260 bp, Unknown
  Description of Unknown: RightRegion for integrase B10653 sequence
agaaaaacttataaagaagaaattgataataattttgaattaaaaatatttcttaaaatataggtattgtaataccttcttcaatatgttattattataaaataaatagggttatcataaaacctccattcaataggaagttttatgatacctccaaataagagttcataaaacctttgatgaaatataggagtgtagagaggaaaaccacttaaaatcaacctttacaactaaccattgtaggaattgccgtttgaggg

SEQ ID NO: 36653 - DNA, 260 bp, Unknown
  Description of Unknown: RightRegion for integrase B10654 sequence
cgcgaagcccgcatccagttcccgcctcgccaggccggctacatccgattgcagaggaaatgaaaaaggcccggaagctttgacgcctccgggccttctctattactgtaggctgaatcctttcaattcgagccacaaaccattgcagttgactccacactattgagcggatccttcagcattgagctgatgtagttaaagacttttcttttgcagagctcatagatggagcccggcaatcttgccagaaccagcccgac

SEQ ID NO: 36654 - DNA, 260 bp, Unknown
  Description of Unknown: RightRegion for integrase B10655 sequence
ggtaagagcggccccaagccgatgccagtaattgaccgggtgattcttgagccgcagggttgacactggccagcagcgcgaactacggtcagtgaccgtgaaggtgtttaccaccaactaactaccgtcagccggggcgcgagacaagccccggccgaccagcggacggtcgcaaaagccccgccatcgaccagcggacggtcgtaaaagccccgccatcgcccgagagcgggagggcgtaaaaccaccccgagatcacc

SEQ ID NO: 36655 - DNA, 245 bp, Unknown
  Description of Unknown: RightRegion for integrase B10656 sequence
tcaggcagcgccctggcacgggtccacctaccaccgccaaggcctaccagaccgcaaaaataaagggcttccggcagtacgctggaggccctttattgattactttgtatgctcactctctctaccatctgagctaaagtggcgtgaagagagctcatcttctataacattgagtggtttaagtcaagtccgggtaggatcgcagggcacactttatctcgttgttttgagatgtctgattgaca

SEQ ID NO: 36656 - DNA, 260 bp, Unknown
  Description of Unknown: RightRegion for integrase B10657 sequence
atgaagagtgggtgcttttacagtgtacagggtaaaggaatcagttattatgatataaaatagtccagattacgcaagaaaaatcgaaacgataaattaatcgtctcgctcttttatgcgctccacaattaaaaccagctatcaagaataagaaaagagaggctcttttgaagtctctctttttctaaatatatagagtttataagttttatgttgtaggtgtatctgctgtgaaacttaaattccaatgtagtgtaata

SEQ ID NO: 36657 - DNA, 260 bp, Unknown
  Description of Unknown: RightRegion for integrase B10658 sequence
tattcatatagtgcaacacaaaacataatttatatgaataactggatactgatagtagcataaaaaacctccgacagggagaatcttttccctgtcggaggtttgctgtatcacattaaatttcttcgagagtaaccttatatttcttgccattcagtgagagttcgccaatctgaggagcaggcttttcctgaacgggagcaggagcaggattttcaggctttttaaagccgttaagccctgcatttttgattatagta

SEQ ID NO: 36658 - DNA, 237 bp, Unknown
  Description of Unknown: RightRegion for integrase B10659 sequence
tcccttatcgaaaaaatagaagtattaaacggggatataactatcttctggaaattccaataaaagccggggctccgggccctggcttttctatactacaaaaggcgacctattctattgattaagcctgcgccgtaagtataggttatccgctctctttcttcattgtaaacgccaaagacattctttccataagaagtctttaccagcacctgactgtataccgcttccctgtcc

SEQ ID NO: 36659 - DNA, 260 bp, Unknown
  Description of Unknown: RightRegion for integrase B10660 sequence
ggttgcggcggttcgcaacatattttacccaaaattcttttcaaatacatattcaaaaaataaaaacctccgacagagagaacatcttccctgtcggaggttttctgtatcacattaaatttcttgattgttgtttttattaattgattaaatcagccctttccttttttcataccattctataaaatttccaaaaatttctttttcggcaattttccttgcgtctatcgcatcttggaggttatcaaaccttccaagat

SEQ ID NO: 36660 - DNA, 260 bp, Unknown
  Description of Unknown: RightRegion for integrase B10661 sequence
aaattatttgaaaaaatagtatataataaacaagaagaaacaattgaaattacttataaataaaagatttttttattgtataccaaatggacttaattccaatcaatgtcatttggtatacatatataatatagaaagaaaaaacactaaataaaataatttagtgcttctttttgccttaataaaatttctatactgcaatcaagatatgcaaaatattttttacctctttgccttatgtgtataaccttataatcagt

SEQ ID NO: 36661 - DNA, 260 bp, Unknown
  Description of Unknown: RightRegion for integrase B10662 sequence
actatcattgaccacatagaagtagttagtgtggacgatattacaattgcttaccgtagttaattagttgtcggttatgtatagttagctttcccgtactatacataaccgacaaccgaacaaagccagtagaatcaatggtcacgctttaagcggcttcggcaagcgggtaataaacttaccataaccattgttgcattttattaaattcaaactatggtacctttgcaagctcaataagtcttcctccgtaaatggat

SEQ ID NO: 36662 - DNA, 260 bp, Unknown
  Description of Unknown: RightRegion for integrase B10663 sequence
actatcattgaccacatagaagtagttagtgtggacgatattacaattgcttaccgtagttaattagttgtcggttatgtatagttagctttcccgtaccgtacataaccgacatacgaacaaagccagtagaatcaaggcactacattttaagtggcttgggtagatgggtaataaatttaccgtaaccgttattgcacttaataaggtttaggctgtgataccttgccagccccaaaaggtcttcctcggtgaacgga

SEQ ID NO: 36663 - DNA, 260 bp, Unknown
  Description of Unknown: RightRegion for integrase B10664 sequence
aatagagtaataatagacggaaataagaatataactattgaattaaaatatatagaggattaaattcctcttatatttttagggtttatgttggtatatttaagaccatactagcatatactctttatggagcataaaatattgacactaatttaaatcatatgtataataatataaaaataagtaaataatatgtttgttgataaataagggaggtagataccaatgataaatatagaagaatttatagagttaaaagt

SEQ ID NO: 36664 - DNA, 260 bp, Unknown
  Description of Unknown: RightRegion for integrase B10665 sequence
agaacagacggcgaaaagaagccgaaagcctatagtatcagctttgttatttattttaagtagtttctttccaatgtacattcagaaaggcgacggaaaaacgctacgttgccacggcgacacccacagccaaaacgcacaaaacttcccatatattcctttgattgcggagcctattttccgtcttgtcgcgctctttctcgtattcccgaaatgattgcgcggctttctgcaattcttcgttcgctatctgcaacgag

SEQ ID NO: 36665 - DNA, 260 bp, Unknown
  Description of Unknown: RightRegion for integrase B10666 sequence
agaacagacggcgaaaagaagccgaaagcctatagtatcagctttgttatttattttaagtagcgttattacgtcgcacttttgagtgtgcattgtagaaacgctatttataaacggctaaacgaaaacgcccggcaaaacgccggacgcaatctccgctccttgtaacctctttacatgagctaaccaaattatatcatactcaccgcgccacggcaacaccaacggcgacaagacacagaacctcccaaatattgcgc

SEQ ID NO: 36666 - DNA, 260 bp, Unknown
  Description of Unknown: RightRegion for integrase B10667 sequence
tattctcaaaacagtaaatatgaaaggaaaataaagaaacctgaattattagaagtgatttagattaatatctcataagtaattgattatcaatgaaatataaaatattatcttcttatatactttcttaaccaatattcttctttatcctcgtcatatacttcatatccaagtcttttgtaccattcaaattgccattgtctttgtttttcaaccgaaagacatacaatattaaatccttctctcaaagttatttcttc

SEQ ID NO: 36667 - DNA, 260 bp, Unknown
  Description of Unknown: RightRegion for integrase B10668 sequence
agaaataaaaaaggtaatattgatcctgatcttgttaaattaaaaatatatttaaaaatttaatgttggatttttattacattttatattacaattatattaaatttaaataagaagtgttgacttcttattttttttaatatatattataagtaataaatacaataatcattactcaccttattcaatagatgataaatgattattacaataaataagaggacacaaaaccagtgtggaagcaaggggtgttgagagga

SEQ ID NO: 36668 - DNA, 260 bp, Unknown
  Description of Unknown: RightRegion for integrase B10669 sequence
aaaaatacaaggcataatattgaccaaaatttatttgaattagaaatatttttaaaaatttagtacaaactctttactttttattttttttagtataatatttagaaaagtaaagagttatcattgtactggttactcatagagtaagttttgataactccctaaattaaatataagagggtataaaaaaagggcttttaattactgataataattaaaaacccagttgaaagttatcaccactaactcacaaccattta

SEQ ID NO: 36669 - DNA, 260 bp, Unknown
  Description of Unknown: RightRegion for integrase B10670 sequence
tatactaatggaccatcaggtaatcagaaaggttggaaaaataaacaacaaagaaatagttaaggaggaatagaaaatggaagaaagagtaagaaccgttaccgtaatgcctgcaaccttaagggcaaacctatcggagatgatccaaaaggaaaatgtgacatattatgccagagtatccactgatatgaatgaacaagaagagtcatatgaaaaacaaagagaatacttcgaaaactatatcaaactaagacctgagt

SEQ ID NO: 36670 - DNA, 260 bp, Unknown
  Description of Unknown: RightRegion for integrase B10671 sequence
tacgcacctgtcagtccggtgtacctcgacaggacgccagagaagcgattgcagcgagtttgatctgctcctcccgtaggcataccctcgcctccaaaacggctctggagaggtctccgttcgtctcaagaggattggcgggcaattgacagggttcagtcaggatcgccgggatagcgggacactcgaccctcagaaagagcctgtcgcaccccgtcaggcacaggctgaccagcccaatcagcattatgttgcagcgc

SEQ ID NO: 36671 - DNA, 260 bp, Unknown
  Description of Unknown: RightRegion for integrase B10672 sequence
gaaggtaacaggaaggtaaacaacatcacatttactttgggatggctgtatattgcagcataaatttatgtaaaaatggccgacagaggaagttctttcctgtcggctgaattttgtaaaagaaaaaacagcaatccctgccgaacgacaggcagggatttttgctgtgtagagcaatataatagtatctgactttgtcagacccaagtagaattgtagcacattttgtcgactttgtcaagtactttttttcaaattag

SEQ ID NO: 36672 - DNA, 260 bp, Unknown
  Description of Unknown: RightRegion for integrase B10673 sequence
gatttctactttatcaatggcctggtcgtattagtttccaccctctctttcttccttgaatgaacagaaaaaggccctcactaggatatctgcattcctggtgagggcctttgtgttggattttaacaacatacgatattttctatcattctccagacagggccagaaaaacctgttaaaatctatcgaaaaggagaatgacttatgatcaagattttgctttctgcccgcctcggcgaaaagcgggtgagtcaaacgga

SEQ ID NO: 36673 - DNA, 260 bp, Unknown
  Description of Unknown: RightRegion for integrase B10674 sequence
acgtccaccatcagccggatagacgccacgaaaacgcggctcgatgtgtcgtggctcgtgtgacaaatttgtgacgaattatgggacaagtttgtgacaaattagtgacgagttttgtgacaagtttctttcggcttgcgccgcaacaattcgcgcagcagagaacgaaccaaagggaggaattgaaatgatggaaaacgaaaacatctggggccacatgtcaacgattcccatgcagcccctttgttactgctcctctt

SEQ ID NO: 36674 - DNA, 260 bp, Unknown
  Description of Unknown: RightRegion for integrase B10675 sequence
ccgacaagaggtcaagttgcaaacgacaaaccgattgaattaaaaatatatttaaggatttagtaaaatctatttactttttccttaatatatattagtataagtagtgtaatcatttaccgccttttacataaggtagtttatgatagcactataatattaataattggtttttaaagcataaagttttccataataaacataaggtctgtcaagccgacgctaaaaagttgatacgttttcgttgacttaataacgaa

SEQ ID NO: 36675 - DNA, 260 bp, Unknown
  Description of Unknown: RightRegion for integrase B10676 sequence
cggcacgccggcatccgggtagagtgcgaagatcgccacgtcgtggccatccgcatagagtagcgggacaaaaacggcacgggaacgcgcttcatgtccccagaagaggtcccgtgtagcgttgtttcccaacaacgctacacgggaccgaccagataggcccttgacagggagtatgaatctggagtatactcgaaccaactagaaccggcgccatcattgcccgtgatggcgctttcatccaaaatcgaagagcccac

SEQ ID NO: 36676 - DNA, 260 bp, Unknown
  Description of Unknown: RightRegion for integrase B10677 sequence
tcaacggaaggttctggccgctgtagcttcggcagaaccatcgctatccaggtggccgcgtgagggccggtgactgcctttgtgtgaagttcgcacccgccccctttgacctcgctaacttggcggaacgactcgtctcgctagtccggttagcgccggctgagtgccccgttttcgctaaaaccctgggagatccagagtgagatgggtgctctcgcaccgcgccgaccggcaggcactcccgctcgcggaccggcact

SEQ ID NO: 36677 - DNA, 260 bp, Unknown
  Description of Unknown: RightRegion for integrase B10678 sequence
cgcatcgagtacgagaaagaccccgagtcgggttctctccggctcagggtcttcttcaggtaatcccagttgaacgcttaattacgtcagctggcaaatatctcgattgtgtcccactcttataattaagctagagcttcttcgcgatggcgtcgagcttcttcatcatagcggcctggttcgcctcgatggcgtgcatgcgctggtcgatgtagccgatgcgctcgcccagcttcgccgtgtgcttgacctccttgcct

SEQ ID NO: 36678 - DNA, 260 bp, Unknown
  Description of Unknown: RightRegion for integrase B10679 sequence
cagctgatcaaccgtattgaaattgatggtgatgacatcactattcactggaattttgtatagaaaaagcgtacctgattagatacgctttataaaatcatgatttgaataccaacatgtactattcgctttagcgaagtgtccatgttggtatttatttttattcctcattatcaatgaactgatatacaacgaaggtaacaacagtatcaggttcttcaattggtgtttcaagtgttatgtaattgttgctgatggtg

SEQ ID NO: 36679 - DNA, 260 bp, Unknown
  Description of Unknown: RightRegion for integrase B10680 sequence
tcaacaagaggtcaaatagcaaacgacaaaccgattgaattaaaaatatatttaaggatttagtaaaatgtatttactttttccttaatatatattagtataagtagtgtcatcatttactgccttttacataaggtagtttatgatagcactataatattaataattggtttttaaagcatacagtttaccattaataaacataaggtcttgttgagccgacgcacaaagtcaacacggtgctaaatgtatttcaccta

SEQ ID NO: 36680 - DNA, 256 bp, Unknown
  Description of Unknown: RightRegion for integrase B10681 sequence
atggataagtcagcgaccttaaccctaaacctaacccaaaattggcttttaatcccggcatgaggcctcctttacaacattttgcacaaatagcagcactctaatttgtgcaagtatacaaaaatactcattgagtgcattttttatcaaaaaacgcttgacttttgtactcaatgggtgtatactataatcaaggcaagagaaaaacgccgaaaaaggcaggcgtttgtaattgctaaataaataatgaaagagg

SEQ ID NO: 36681 - DNA, 260 bp, Unknown
  Description of Unknown: RightRegion for integrase B10682 sequence
ttaagttttgttaaaagcgtaacgattgataaaaacaataatatcaacattacctttggttaattgcatatcaaatggtatactacgctacagcattattgcccgcaagcaaacccgtaataatggcttcggtatgcccaactacgattgctgctttttctccaccacaaaatagattttccgccccttctacttgtagagtatgattacatggagcaatgcctagatagcgcatagaattaccaagactacccgcatag

SEQ ID NO: 36682 - DNA, 260 bp, Unknown
  Description of Unknown: RightRegion for integrase B10683 sequence
tcaggaagtccatgcttacacaaagtcatttatatgtcaggctggttatttgttgccgcctgaaaattgaaaaccaataaaaaaattcggtagaaatcaaagttctgccggatttttcattgatattccgataaaaacaacagggctattaccctgtttgaattcgcattgttcagtatttgccctgaccccggtcacttccgaaaacagtgacagcgattttcaatccccccgcatatttttattcaataatcttccag

SEQ ID NO: 36683 - DNA, 260 bp, Unknown
  Description of Unknown: RightRegion for integrase B10684 sequence
ttcataagcaaagcactatacaattcaaagacaaaaaccctgaccgttttttattatgcctaaaaattataacaaacagcaatacagtccgccgtactgttattcgttgttattggtgataaagtcaaattttaagtgatttgcaacagatacaaaaacagggagagcaaatagctctcccctttttatttatttctttacctcaacatattttttgttaagactaatatatccagcaccgctttagatttatgacgcct

SEQ ID NO: 36684 - DNA, 260 bp, Unknown
  Description of Unknown: RightRegion for integrase B10685 sequence
gctttgattaagattattcgggttttccctaaaggaaatgttgaaatagactataacttttaaggtaagggtatgagtaaatcattgcaaaagagagccaaacttattgatgtaatgctcctagttgcaaaatcccacctaagtaaatatgcgacaaacaattaaatacatggatgacgtaaacgaaggcgattggtacgaataccagtacgaatacccagacacgcttgatctccttaagatttttccagaggtgaaag

SEQ ID NO: 36685 - DNA, 260 bp, Unknown
  Description of Unknown: RightRegion for integrase B10686 sequence
gagggcggcatgggggcgcgcaagatcgcgccggggcgtgtgacgtacgagtggctgcgttaggcgccgtggcggtcgcggcgccccgagcgttcttcagcgctggccagccgcagcacgcggccctgcgacgcggcgccggtctgtccgctgagcgctgcggcctgcgcggcgagcgagacgaggtgcgcgcgttctgtgccgagttcgccggcgccggcgccgtagagggtacgacggcgcgactcggcgtcgcgtgc

SEQ ID NO: 36686 - DNA, 260 bp, Unknown
  Description of Unknown: RightRegion for integrase B10687 sequence
agattatttgatcatatcacttataataaaaaagaaaatacccttgaaatcgtttataaataaagcgattattatttgtactttatcagtataccttttggacttattccctattagttccatttggtatactaatataaaattcctttcaaataaaaaagaactagagttataaaaaccctagtttttctttccttattatatagtagtcttatttgattactattttttgaccaacatatattaaatttggattagcg

SEQ ID NO: 36687 - DNA, 224 bp, Unknown
  Description of Unknown: RightRegion for integrase B10688 sequence
agattatttgatcatatcacttataacaaaaaagaaaatacccttgaaatcgtttataaataaagcgattattatttgtactttatcagtataccttttggacttattcccgacaatatcacctttatggcaatattcactagtattttcagctattgtatcaaaagcaatacaatcaacaaaatcagtatcataaattccttcactatttttaaagcttcttg

SEQ ID NO: 36688 - DNA, 260 bp, Unknown
  Description of Unknown: RightRegion for integrase B10689 sequence
atcgattacttcagggaatcggcagcagagcctccgaggctttttatttatcctaaacagtgatatcaatttagtacggtttcaactgtcttatgatgatatacaggttttcttctcctctcgctgtgctcgttcgcgccgtatgccatttaaaagcgtttaaatgcccctaaaacgaattatgccccgcaggcggtgtcgttctccatttgcggggctaattttgttctgaggcctttaaaacggtttaagcaaaaaag

SEQ ID NO: 36689 - DNA, 260 bp, Unknown
  Description of Unknown: RightRegion for integrase B10690 sequence
agaatatttgaaaaaatagtatataacaaaaaagaagaaagcattgaaatcacttataaataaagggaattttattttgtatcatttttggtcttgattgcaattaagtccatttggtatataaatacataaaaaagaactagagttataaaaaagccttcacctgcaccagattgaaactataaatccttgaaattcaaggctttttctttattttcaagggattgcgtatgattgtttagtgtgttttgtgtgactat

SEQ ID NO: 36690 - DNA, 260 bp, Unknown
  Description of Unknown: RightRegion for integrase B10691 sequence
ccggcgcggcagcgcggcaagtgggacccgtcgcgcgtcacgctgacgttgaccgccgggtaggacgccgccggcgccgtttacacgcctcgaagagcccttctccacgccggagaggggctcttcggcgtctccaggtgtgacgttgtgacggttcttacgtcactccccgttagtgctatagacgactcctctctatagagagaactagaggggtcaccacttccgccacttcgccacgcgaagaccactcccctctt

SEQ ID NO: 36691 - DNA, 260 bp, Unknown
  Description of Unknown: RightRegion for integrase B10692 sequence
tgcgataagataatctttcataaacacgatagcagccttgagctgtttttaattgatcagtaagcctataccctaatgaagtatggaggtgcagatggcgagttgggtgcctccctgcggtatctcagccagaaatttacgatggtaacgcctgaggcaaaggcaacgctgaatgacattgctacagaggaatatgtgtgttacatctatcaattattccattcatacagcagaatcagaaaataaaaaccccatccttg

SEQ ID NO: 36692 - DNA, 260 bp, Unknown
  Description of Unknown: RightRegion for integrase B10693 sequence
gaaaccgttatctgggacaaggcgaccgaaacccttacgatcacataccgcgtttttatttaaccctgttttattgcctgatggagtacggaggtccatacaccaacagactatcatttcactatcacagcatactccctcatgccgcccgcaacaagcaggcggctttttctgctgctttgggatgtcgtccctgcaatatgaaggataccgctcataaaataggcgcgcccgatttcccggacgcgccccgcctgtct

SEQ ID NO: 36693 - DNA, 260 bp, Unknown; identical to SEQ ID NO: 35864
  Description of Unknown: RightRegion for integrase B10694 sequence

SEQ ID NO: 36694 - DNA, 260 bp, Unknown
  Description of Unknown: RightRegion for integrase B10695 sequence
actagaaaagttagaaatgaaccagatatttttgatgttgaagtagatataaaatatatttagaaagttagtgttgactttctaatttttttaatttaatatgtaattaaattagttatcatataacctttgatgtatagatggtttaatgataactgttatctaacagttgaagctatgaaactttaaaccgaagagtttggccaagctcatgcatagaattggctcggtgcaactggattccttcaagtccttttcat

SEQ ID NO: 36695 - DNA, 62 bp, Unknown
  Description of Unknown: RightRegion for integrase B10696 sequence
attgttgacaaagttgtctttgaccgcaaaacgtcaagcattgagatgtattacctgtgctg

SEQ ID NO: 36696 - DNA, 260 bp, Unknown
  Description of Unknown: RightRegion for integrase B10697 sequence
cgcatcacatgggacaaggcgcagaacctcctgaccatccactaccggctcatgctggaataatttttgcccataatcgtagtctgttaccatccggtggcccggacaccaacagactatgaaatgggcgcgttttcctaagttgaaatttcacaaaaggggtttacaaatacatttttgcgtaatatactatgactaccgagagcgaaagctcccggtcagatagaattgacgtccgtcaatcaccatctgccctaaag

SEQ ID NO: 36697 - DNA, 260 bp, Unknown
  Description of Unknown: RightRegion for integrase B10698 sequence
gactcctgcacctggcagaaatcgaccaaaacgcttgaaataacctacagggtttttctttgactctatattattgtctgttggagtatggcccgccgtactccaatagacgatgaattatcttttctattttttcaaattcctcttgacattatttttattctgctgtactcttgaaaaaatgcacaccaaaattcttttatattgcggatgagattcttgtttggaggacgccccgtggaaaaagaacgtttctttca

SEQ ID NO: 36698 - DNA, 260 bp, Unknown
  Description of Unknown: RightRegion for integrase B10699 sequence
tctctgatcagaaagatagtgctcgacggagacaacatagagatttactggaattttacgtaatcattcctacgtaacacgtatgtattagcaaaggttatctgttggaatgatttaatgatgatggtataatgtaactgatcaatgatttcccctttttcctcctggcctcctccctttgggccgggaggtttttcgttgcttttcatatcaacggcgccgccgcgatcacggtctgtaagatggccgaagagctcgac

SEQ ID NO: 36699 - DNA, 260 bp, Unknown
  Description of Unknown: RightRegion for integrase B10700 sequence
ggaacaagtgatacccaaaacaaagctatccaaatgtccggctggctcctgattgcagcctgactaaaagtataaaaagcaaagcccggacggtcaaaacgacctgtccgggctctcatttttatctccgaacccccgtcacatcaaaccaagtccctccaatacaaagctcccccgtaatgatctcccccggcgtttccgggggtgtttcctgctccggcatcggcggattcggcagcacctcaccggtgccggacccc

SEQ ID NO: 36700 - DNA, 260 bp, Unknown
  Description of Unknown: RightRegion for integrase B10701 sequence
ggcgtcaaggtatatgtcgaaaaccgcgagatagtcagaatcacctttggtgagttgtcctaaacatcacggtttctcgataccacgatattgagtacctttttgcattctccgaaagtctcacaatcctcttaacatcctctggactagacataactacccaaaatttccactttaggcacaatctaggcccagttacttgacacggccatgagggtgtggtattatgtaacttgtggcatagttaacataatgcgccg

SEQ ID NO: 36701 - DNA, 260 bp, Unknown
  Description of Unknown: RightRegion for integrase B10702 sequence
gtagacggaagtgacgggtttcagcacatcactcgtggtatcgcagcctataaactgccgtaaaagcgccccttttttgtgacagcgattatacctatgaaaaacttaaaacccgccgcaatcacggcaaccttagtcgccctgctcgttggatgcgtagcagcaacccgcgcaccagcgcaaatcgaaaattgcaaacccgtgccacgcactcatcatagcgcctgcgtgtggacgattgacgaaacaacgcactttat

SEQ ID NO: 36702 - DNA, 260 bp, Unknown; identical to SEQ ID NO: 35849
  Description of Unknown: RightRegion for integrase B10703 sequence

SEQ ID NO: 36703 - DNA, 260 bp, Unknown
  Description of Unknown: RightRegion for integrase B10704 sequence
gaattatttgataaaatagtttatgataaaaagaatgagaaacttataatcacctataaataaaggttttattaatttgcatatatgaggaagttaatcccgaacaaattctttatatatgcactatataatatagaaaggaatattatgaattattgcatatatttaaaaaaaagaaaagaaaaaccattttgtaaattattaaataaagaaatattgctttcctgttgtcaggaatgtggtaataaaaagtataaaac

SEQ ID NO: 36704 - DNA, 260 bp, Unknown
  Description of Unknown: RightRegion for integrase B10705 sequence
tccctgattgacagtatagtcgcattcccggatcatatagaaatacactggtcatttgcatgaccgcaaaaaagaaaggccccgcggtgatcttccgcgaggcctttctcatatttgtttatatttattgatatctgttgatattacatcatgccgcccatgccttggtttgggacgttaacatttgcaggctctttaatgtcagcaaatgttaacggctttcttccttattaaaatctatccggacaactctctccagc

SEQ ID NO: 36705 - DNA, 260 bp, Unknown
  Description of Unknown: RightRegion for integrase B10706 sequence
ctgatcgataagatagtcgcttatccagatcacatagagatccactggtcatttgccggatgacataaataaaagcctcacggtggttatttccgtgaggctttttacttactgatatttattgatatttattgatatttggtgatgtttttaaaatttgtcaagatttgcggtcgcctcaatgccggcaaatgttgacagatttttattctttttcgaaatcttcgcgaactacacgctccaggagctcaagcagatag

SEQ ID NO: 36706 - DNA, 260 bp, Unknown; identical to SEQ ID NO: 36000
  Description of Unknown: RightRegion for integrase B10707 sequence

SEQ ID NO: 36707 - DNA, 260 bp, Unknown
  Description of Unknown: RightRegion for integrase B10708 sequence
gtctttgacaacaagaagacccgattcgatgcgaaccgggttgagattgcttggaaggtttagatgtgcgggatgtattcggtcatagaaggctagccgccttctttagcgctgctttgctcttgaccttcaaagggacgccgctctttgcggttgattccttcagataagtcttcatatcagcgctattcatgtgtgcatctattttacctcataagccattgactttaaatagcaattcttcatactcagggcagata

SEQ ID NO: 36708 - DNA, 260 bp, Unknown
  Description of Unknown: RightRegion for integrase B10709 sequence
acactgatcgaaaagatcgagatcgacgacgagcttgtcgaaatacactggaatttcgtctaaacccttgatataccggcgtttttattattataccccctaacggacgccggttttaactgtcgtcctttagggagcaaaaattattaagtgaggttttataaatgtataacataaaagtaaagaaaatgatagaagatattagagacgcgcttatcctggaacatggatataactttttaaagctctccgtaaaggat

SEQ ID NO: 36709 - DNA, 260 bp, Unknown
  Description of Unknown: RightRegion for integrase B10710 sequence
gataaaattgtatatgataaaaaaggtggggcattgttgatgtatttttatattaacgactaacaccaaattgcccgcaatccctttatttatcggtgtttcagggcatcgttatacgttatagcagtatggcggaggatattgcaataacgtatgacggtttttatatagaagaaagtggtgattttttatagaaatttagggaaataatcttagattttaaatgttttataaaaaaattcgggagcacccacaacaaa

SEQ ID NO: 36710 - DNA, 260 bp, Unknown
  Description of Unknown: RightRegion for integrase B10711 sequence
aagaacaattcacaccataaaaaccttgacgacgcaaatgtggagattttcctcaaaatatagttgcaattcaatcggggtgctgttattattgtgttatggtaaacaacgcccttccgattgataggttgtgcaatgtttaccatagcaataatgcgtaacagccttaattttggctattatgtaaatagaaatttatggtaaaacggtgtataatagtattacaaagttccgagtgagttgagccgaatgcgagttca

SEQ ID NO: 36711 - DNA, 260 bp, Unknown
  Description of Unknown: RightRegion for integrase B10712 sequence
acactaattaaaaagatcgttatagacggcgaggacgttactatctattggaatttccaataggtagttattgtctactaaatacggacaaccatcaatatagttgtccctacttagatgatacactaaaacgagaccgaggttaatactagcctcggtttttcttattttaaaaattttaaaaaagtttaaaatagggtattgactttatacacctacgggtgtatatttatattaacaaataaatcacacatacacac

SEQ ID NO: 36712 - DNA, 260 bp, Unknown
  Description of Unknown: RightRegion for integrase B10713 sequence
gacacctgcactttcgataagcaaaacatgcttctttccattgtataccgctatgaaatctgacttttttctccatacctaaaattgtagtctattgacgtccggaggtccagataccagaagcctacaattccaccgcaaatgaaaacgcgcagcgaacttaaccgctgcgcgtttcccatattttcgtgtcatatctcattcacggcgcatgtaccgatccgttcggagcgctgctacaatcgaaaaatttcgctttc

SEQ ID NO: 36713 - DNA, 260 bp, Unknown
  Description of Unknown: RightRegion for integrase B10714 sequence
cagctgatcaacaaaatagtgattgataacgatgaaatcactattcattggaattttgcatagaaaaaagcgcacctttaaaggtacgcttatcattaaacccatcataccatgatgtgatgttaactaaaatgaatgccacatcatggtatggtcaatctgattcagtttctgcagtggctttatagactacaaaagtaatcacagtaccagcttctgcaatcggtttcttaagtgtcacaatgtagttacccagcaca

SEQ ID NO: 36714 - DNA, 260 bp, Unknown
  Description of Unknown: RightRegion for integrase B10715 sequence
acggaagaaatgaaacaaaaagcaaaggaaaggagtttacaatggcacgaaaaatcacaatgattccgcagaccattaatccgcagacacgaacggcaatggatacgagaacaaaacgaaaagtagcaggttacgcccgtgtttcaacggattatgaggaacagattacttcctacgaggcacaggttgatcattacacaaattacattcaaagtcgtgatgactgggagtttgtcaaggtctatacagacgcaggcata

SEQ ID NO: 36715 - DNA, 260 bp, Unknown
  Description of Unknown: RightRegion for integrase B10716 sequence
gtggttcgaccagtcgatggaccggtggaggtacgggtggagccggtcgtggacttggagtgactcagggtcacatccctgggtcgtgtcctgtcgctggacgacacggcggcgagggatgcatttgacctaccgaaccaggatcggccgctaccctgcggccaccatcgcacggggagaacgcatgaagcgcacagcactcgtcttggccgccgcctgtctcgcgttggccggatgcggcggcggtgacggcgttgcgg

SEQ ID NO: 36716 - DNA, 260 bp, Unknown
  Description of Unknown: RightRegion for integrase B10717 sequence
catcccgccgtgcccccgaagaacgtgttcaacagggcgagggtggagatccgttggcgttagccagcaccgccctccaacttgccctcgtgctcttcctacggtgcttcctcgtcctcaacctgctttccgccggagggccccgcctcgcctggtgacgcagaattgcccttcgggcccgtcggaccctcggggcctgtaggccctggggcacctggcggtcctgggggcgaatactcaagggcttctctggccgtgtt

SEQ ID NO: 36717 - DNA, 260 bp, Unknown
  Description of Unknown: RightRegion for integrase B10718 sequence
aaaccgataaaagacaggaacgagggaaaatgtgaagtgcaaaatatcgaatttaatttatagggggcgtttatgatacgcaattttgacttgttttgttcggataaatgcggcgaaccgctaaacaaaatttacaaagaaaaacggacgataacaagcacaagcgaattaaaagccgccgtcacattcgaccatgtggcggcggcatataaaaagaacatgagaaaaaacgaaaattacatacaatcgaattgcgttat

SEQ ID NO: 36718 - DNA, 62 bp, Unknown
  Description of Unknown: RightRegion for integrase B10719 sequence
aaggtttttgtaaaatcaggatatattaaaatagagtggaaaattcctttcaaaaaaatgtg

SEQ ID NO: 36719 - DNA, 87 bp, Unknown
  Description of Unknown: RightRegion for integrase B10720 sequence
aaggtttttgtaaaatcaggatatattaaaatagagtggaaaattcctttcaaaaaaatgtgagttttaggtaccaagcattctaaa

SEQ ID NO: 36720 - DNA, 260 bp, Unknown
  Description of Unknown: RightRegion for integrase B10721 sequence
tgggtcggcgagtcggagacgtggggcgagcagtgggagcgggagggcctcgaaaggccctgactgccgctgtcagctggcgctgcgtttcccaccgttgccggctttgcgtgcttcggcgcggacccagcgcaggtatgagagcgcctcttcgcgtttgctggacgggagggcggggtcggcgaggatttccagggcttcggcgacttcggtcgtgtaggtgattccgaggccgctggtgccggtgaggtcgtcgtcgg

SEQ ID NO: 36721 - DNA, 260 bp, Unknown
  Description of Unknown: RightRegion for integrase B10722 sequence
gcactaataaagaaaataataatcaccggcgacgatattacaatccattggaatttcgcttaaagccttgattttaaaggctttttaatttgccgactcaataacaccctttagatacaatgttcttagtcattgtttctaattggcgttatatatctattcgataccgaggagtaatatcctcggttttcttttgaaaaattttttctgaaaattataaaaacttgatatgtatcatttacatatacgcttacacgcgt

SEQ ID NO: 36722 - DNA, 260 bp, Unknown
  Description of Unknown: RightRegion for integrase B10723 sequence
gcctgtaaggcagaattgcagcacatcccttttgttgaagacctgatttcggagacggcatgagtatccgccatcggaagcggaagaccactggagatctctatccggatcttggagaaggacattggcaagatggatgatcacggatcaacgacagatccgctcgacggctgatggcggaatgtgccaccgtccctgaattttcttcgcgcctctcaactcttgagtgtggcaccattcacggacggttttttctgtaa

SEQ ID NO: 36723 - DNA, 260 bp, Unknown
  Description of Unknown: RightRegion for integrase B10724 sequence
gtgtcggcttgtggcatcttcgcaaccctacacaaaacaaccctgataataatagccgcctgatcagaggaccttaataaacgcccccggaaaatccttccgcaccgtttcaaggtacttttcggcgttttcccgtgaagcaaatgcaccgacctgtacataatacaaagcggcaggatcaccgccgagagcagctttgaatttctgccattccgattccgagccgctttcggcgttccatccgacgatccccggacacg

SEQ ID NO: 36724 - DNA, 260 bp, Unknown
  Description of Unknown: RightRegion for integrase B10725 sequence
atcgagtacatcgaggtcttccccgatcacatcgcgatacactggctcttctcggcacaatgaaaaaggccccgcgggatctctcccgtggggtctttgagttatgacatttttggaacgttattccagttttgtcaggggttccggatcaatagtccatcccggctcctgcgccgccgttctgcggtacagggtttgcaggttccttgatatctgcaaaccatgtacagtcaacttatgtcttatctacataatatagt

SEQ ID NO: 36725 - DNA, 260 bp, Unknown
  Description of Unknown: RightRegion for integrase B10726 sequence
ccgctcccgctccgcgtcatcgaactgcccgacggtgacgacccacgtgtgctcggggtgtagctcgctgagcatgtgctcccacgtccgcgcggcgttcgcgagcgcatcatccaggaggctcacgccgccgcctcctcggccgcggtctcctcgccgtacaaccgcgcgagcgtcgtcaacgtctcccccgtcgcctccgacaacgccgtggcctgggtggcttccgcggtgaggtcccggacgctgcgctcgctgct

SEQ ID NO: 36726 - DNA, 260 bp, Unknown
  Description of Unknown: RightRegion for integrase B10727 sequence
gtaaaaaaaatcacgctggacggggagaacgtggacatagaatgggcatttctggacgattaagcggattttttggcggtttattgccctttcggggctttaaagccatgaattacccttgtgaacggcacaaaaataccccgcctatgcggggttccttcccatcatcggaagcctcaatggctcagggctatctgccatgccgccatcggcctgcgtctcttcggcacgagcgggacggacgggcgggggctttcgct

SEQ ID NO: 36727 - DNA, 260 bp, Unknown
  Description of Unknown: RightRegion for integrase B10728 sequence
agcattatagaaagcatcaccgtcaaggatggatcaggagtcagtattgttttcaggcgctaatttttatctccagccggatgtttagggatgataacgtccggctggagatgtaaattacaaatcagatatggtataataaagacagaacgaacaacggcccgtctcatgcgctttaacggtcacgctatgtcgtggtttagtatgagaggggtaaaaaaagcgccttcgcgggcgctcttttcattccactccaatta

SEQ ID NO: 36728 - DNA, 260 bp, Unknown
  Description of Unknown: RightRegion for integrase B10729 sequence
ccctaccgtgcgggcgttacggggcgtaatcgcatttcgatcatcggggcggatttgcgatgatgtcagaaaacgaattcgtaatgaatcgcattttgctccgactcggaaaagcgattgccgcattgcaagcgatggaactaacgcccgagcaaatcgaggcggttaccgaaatcgataagcattatgcggcggcggttaattggaccgtcaaattgagcgagcaatcggggaataactttcccggctcgaatgttgta

SEQ ID NO: 36729 - DNA, 260 bp, Unknown
  Description of Unknown: RightRegion for integrase B10730 sequence
tactttaggacggactcgactaggtacgctccttttaatctaaaaatttatttaaaaatatagttgataagttagcgctttatatgataatatttatactgttatcatataagagcggacttatccgttattagatggtaatagacaatttaatatttagctcttacttagagctaggaggcttgattaccgactaaaagccgccttaacaaataaatcgagagtttagcgtagcttgtgacggtgaaaaatgcgctcgg

SEQ ID NO: 36730 - DNA, 260 bp, Unknown
  Description of Unknown: RightRegion for integrase B10731 sequence
ccgaacccaatatttttcgtgaaacacgttttcggatttgttttaatagtagaggaggtctaacttcggttaggcttcctctttgtgcgtttgagccaatttcaactccaacacagcggcttcgataaggttctcgatttcttccatattcagcgtaaaaccttttcgattgaggaaagccataacatactttttcttctcctcacctctgcctgtgccgacataaatcatttctgccgcttcgacagcgatatttaccc

SEQ ID NO: 36731 - DNA, 260 bp, Unknown
  Description of Unknown: RightRegion for integrase B10732 sequence
gccaatcacaagcaccattctggaagggacgacgcaagtgtggaaatatttttaaaaatatagttgactgctcaaaaggcatatgctattcttggattatcaagcgatatcatatgccttcttatttatccgaaggaaattgatgttacatgactatacaaaaacaaagctgatattttatcatattttggttattttgtaaatagaaattttggtgaaaacggtgtataatagtattacaaagttccgagtgagttgag

SEQ ID NO: 36732 - DNA, 185 bp, Unknown
  Description of Unknown: RightRegion for integrase B10733 sequence
ttagtaaagaaggtgtccgttacccttgaagaccgtgtgtctattgagttcttcgaggattaatctatatcatgttgtaagaattgctttcgcattatttgtcggcatactataccgctgattgagataccggagcgaagccgacaattcaccgtcaggaccaccatattgggtaataactaact

SEQ ID NO: 36733 - DNA, 89 bp, Unknown
  Description of Unknown: RightRegion for integrase B10734 sequence
cgattattgtttgagcgaatagaaattgaaaacgaatcaataagcgtagttgttaaaggatagtttagcgccttagtacattatcggat

SEQ ID NO: 36734 - DNA, 260 bp, Unknown
  Description of Unknown: RightRegion for integrase B10735 sequence
  modified_base (87)..(87): a, c, t, g, unknown or other
  modified_base (167)..(260): a, c, t, g, unknown or other
agagggcttataaataaggtcagagtaacagctgaggatattgttatcaattggaaaatataaataattttagtaacctacatttcnttacgattggctcctccgtttttatcatggtattctttataagccttagcctgttcttctgtgattcgcccatctgcttnnnnnnnnnnnnnnnnnnnnnnnnnnnnnnnnnnnnnnnnnnnnnnnnnnnnnnnnnnnnnnnnnnnnnnnnnnnnnnnnnnnnnnnnnnnnnn

SEQ ID NO: 36735 - DNA, 85 bp, Unknown
  Description of Unknown: RightRegion for integrase B10736 sequence
agagggcttataaacaaggttcaggtaacagctgaggacattgtcatcaagtggaaaatataagtaattttagtaaccctcatct

SEQ ID NO: 36736 - DNA, 260 bp, Unknown
  Description of Unknown: RightRegion for integrase B10737 sequence
ttgtatacacttgacatagagactagaaagaagatttgcactatgtcttctagactagcttgaacttctttctaacccataacactaccaaaccaaccaaaccaagtgttgacagtattgcccaaagccaaattggccaagcagcattctttgtcttgacaacctcaattggatatggttctggaactttctcatatacaattgagtctctgactttctcaacttcaatgtatttgtatatgacttgctgtttgtttgat

SEQ ID NO: 36737 - DNA, 260 bp, Unknown
  Description of Unknown: RightRegion for integrase B10738 sequence
gaccgctgcacgttcgacaaatcccagatgctcctcgcgatctcttataaattcattttctgatgccttaattgtagcaagatggagtatggcccaccatactccatcttgctacaatatttgaaatcactttctcagcacaatcccatgataatacccggccatcttcgcctccgcccctccggcatccttatccatgagaaacgcttttgcaaggtcggcatagaattctggccggtcgaggccgtatttcgccgcca

SEQ ID NO: 36738 - DNA, 260 bp, Unknown
  Description of Unknown: RightRegion for integrase B10739 sequence
gaggaaattcaagtggtctggtcgaaggataaaaaggagatcaaggacatcatatttttttgaaattgtagttgtacataatttctgtaccgaacggcgcagaaattaaatacaaacaaaatggcggcttcggtcgccgtttttctttgaagaaaatagtcagaaaattcaaaatacttgttgacaatataccgcaagcggtatataatagttacgtaatcaaggaggggccgcaggcggaataagccgccgggcatagg

SEQ ID NO: 36739 - DNA, 59 bp, Unknown
  Description of Unknown: RightRegion for integrase B10740 sequence
gtcaaggcagtttacctttgggatgataagataagaatagactactattacacaggaaa

SEQ ID NO: 36740 - DNA, 260 bp, Unknown
  Description of Unknown: RightRegion for integrase B10741 sequence
ccgaacaccttatttttcgtgaaacactgtttcggatttgttttcatagtagaggaagtctgacttcggttaggcttcctttttctgttccagcttgagttccataacagccgcttcaatgaggttttcaatctctgctacattaagagtgaatcccttgctgttgaggaactggacaacatactctttcttctcctgtcctctgccagtaccgacataaatcatttctgccgcttcgacagcgatgtttacccaaaact

SEQ ID NO: 36741 - DNA, 89 bp, Unknown
  Description of Unknown: RightRegion for integrase B10742 sequence
ttcattgacaaaatcgtatttaaccgctccgattgcaccgttcggattttttattttatatagtattatcataaggtggggtatgcagg

SEQ ID NO: 36742 - DNA, 260 bp, Unknown
  Description of Unknown: RightRegion for integrase B10743 sequence
cagtcaatcgagattaattggaccaccgaaacaaaagaaatcgttagagttaattttttttagctctaacgtagtgctattaccttgttgccattcggccacacggtgttagtacaataataaccgagaggatgataccaaatgaaaacagcagaagaaatcatcgcctatcttgaggcggagcttaacgaggccattgaccttcacgacgaggcgaaagagaaaaaggatatggcgcaagcacacgcaactctattaaa

SEQ ID NO: 36743 - DNA, 260 bp, Unknown
  Description of Unknown: RightRegion for integrase B10744 sequence
caacagatcgtaatattaaagactggtgactcatgggaaatagtcaaaaccatactatcttgactgtacttgcgtagtaacaagccagcctgtataaacgtagataccgttaatatgtccgttataacaaaaatagccccccaataaaggagggctcttcgtcatgctgatttgttcggctggttataatcaagcaccgccttttcaatcgcggatttgatctcctggggctccacctttatgcctgcgttacccagcag

SEQ ID NO: 36744 - DNA, 260 bp, Unknown
  Description of Unknown: RightRegion for integrase B10745 sequence
atcattgacaagatcgtttttaacaaggcgggcggcacgttcgactttttctttttgccttagttatatcttttgtagatttggcttaccgattcttcaaaagatatacaagcggacgcaaaaaagcgcccgcttgatttttgaatacatttgtgttcaattctccctcttttcgccgtcagcgcagaaccagtcagcacgagtcgcagtccataccattggacagaaatgtccatactctttcccacagttaggcgccc

SEQ ID NO: 36745 - DNA, 260 bp, Unknown
  Description of Unknown: RightRegion for integrase B10746 sequence
ggtgaccttatagaaaagatagagatagataatgatgatataacaatacactggaatttttaacgccctattttactcaatatgtaccaagccctttaacgcttcccacatattgagtaaaagacatataccacctacagagccagcctctgaggtggtctttttaatattatgtaaacctactattacacttgacagattacagataaactactatatattattttttatatcaaaaacatcacaaatttttaatgttt

SEQ ID NO: 36746 - DNA, 260 bp, Unknown
  Description of Unknown: RightRegion for integrase B10747 sequence
ctgattgaagagtttgcgcaggacagcatcggcgccgaactggtcgaaatggaggaggcatgaattccaacagtccaaccgaccagacgaccttcgtgccgctgaatttgaaacggcgggcgggcagattgatcacggacacgggtgcaccggctcatgacgtcaacatcctcaacgtcgtcggtcgtgggttcttttggcaagacctgctggacaccggcgtgtacgccagtggttctgaccttgccaaggttgagggc

SEQ ID NO: 36747 - DNA, 260 bp, Unknown
  Description of Unknown: RightRegion for integrase B10748 sequence
tacgacatcgcagaacctaatcgcctcaatcgatcaacgtctcaattgactgcggctggataaaccatagtccgccgatcttctttgagccttccagttctcccctgcggcacatgccgataatggttcttgccgtgaccgcaaagccagaggcggagagcttcatggcggcttctttgggggatattttatgcccaggcttgctggatgttcgtaacatggttggtcctccagacttagtgtgactcctcatttatcgt

SEQ ID NO: 36748 - DNA, 260 bp, Unknown
  Description of Unknown: RightRegion for integrase B10749 sequence
ttcattgataaaatcgtctttaaccgctccgattgtaccgttcggattttttatttcatatagcattatcataaggtggagtatgcaggtgcatagtccgctttctgataatgaaattctatgcacataaaaagctccccaaggaattaagtcctcggggagaaaattttattccgctaacctctcaaaagtattcttatcagcaattcctgttactgacaagtccttgacagtttggaaggttttaactgcgctctcgg

SEQ ID NO: 36749 - DNA, 87 bp, Unknown
  Description of Unknown: RightRegion for integrase B10750 sequence
agaaggcttataaacaaggttaaggtgacagctgaggacattgttatcaattggaaaatataaataattttagtaacctacatttca

SEQ ID NO: 36750 - DNA, 87 bp, Unknown
  Description of Unknown: RightRegion for integrase B10751 sequence
agaaggcttataaacaaggttaaggtgacagctgaggacattgttatcaattggaaaatataaataattttagtaacctacatttcc

SEQ ID NO: 36751 - DNA, 260 bp, Unknown
  Description of Unknown: RightRegion for integrase B10752 sequence
gaccgctgcacgttcgacaaatcccagatgctcctcgcgatctcttataaattcattttctgatgctctttattgtagcaagatggagtatggcccaccatactccatcttgctataatatttgaaatcactttctcagcacaatcccatgataatacccagccattttttcttccggccctccggcgtccttgtctattaggaaggcttttgcaagatcggcatagaattctggccggtcaagtccgtacttggcagct

SEQ ID NO: 36752 - DNA, 87 bp, Unknown; identical to SEQ ID NO: 36750
  Description of Unknown: RightRegion for integrase B10753 sequence

SEQ ID NO: 36753 - DNA, 260 bp, Unknown
  Description of Unknown: RightRegion for integrase B10754 sequence
aatttatttgaaaaaataacttattacaaagaaagcaatacccttgctattacttataaataaagggtttattagtttgcatatatgaggaagttagtcccgaacaaattctttatatatgcactacataatatagaaaggaattgtaaaaatgaaatcaaaaagaacaaaagcaactgatatatctatgtcagtaaaaaagaaagtatttgaaagagataaaggtaaatgtgttatatgtggtaacatgataaatgtaa

SEQ ID NO: 36754 - DNA, 260 bp, Unknown
  Description of Unknown: RightRegion for integrase B10755 sequence
agagagttaattgacaaggtacaagtcacatctgacaaggtggttattcgctggaaaatttgataaatttagttacgctattttcaataaaagaaagtaaatttgtcactcggacaaaaataaaaaaccttgctaaatgcaaggacacgaactttaaacaatcaactaaatgagccttcgctctacttcaattgtacgcaatttattgaccgatagcctaccacggtctgagccataaggagcgaccctataacttccgt

SEQ ID NO: 36755 - DNA, 260 bp, Unknown
  Description of Unknown: RightRegion for integrase B10756 sequence
  modified_base (95)..(121): a, c, t, g, unknown or other
  modified_base (167)..(212): a, c, t, g, unknown or other
agagccttaatcaagaaagtacaagtcacagctgatagcattgttattaagtggaggatatagagagagttttactatccctcatttcaaatcannnnnnnnnnnnnnnnnnnnnnnnnnntctttattttcttaaaaaatcaataattttactatccctcatttcnnnnnnnnnnnnnnnnnnnnnnnnnnnnnnnnnnnnnnnnnnnnnngatcagagtaaaagcttttacctttgcttcttttaatttcatcatcat

SEQ ID NO: 36756 - DNA, 260 bp, Unknown
  Description of Unknown: RightRegion for integrase B10757 sequence
ggcgcctcgcggctgacgttcgtcactgttcgcgacgagctcggcggcgacgcgctcggctaggatgcggcgcgccgcgcggcgcagcaccgcccgcacgcgagcgtgagcggagggtggcaatggatcggcggccatgtgtggccagtatggcgccggggtccggtgggaaaccatcgaagccccggcgcctctcgcgtttgaaacgcgattgtgttgtgcagacgtctgcacaaaccggcgcgcgccggcgatcgcgc

SEQ ID NO: 36757 - DNA, 260 bp, Unknown
  Description of Unknown: RightRegion for integrase B10758 sequence
atagaatattcaaagcaagccagaggaaaatcctttgatttgagaatatatatgaaaatatgattgacaaatctggtcattataatttatgataaatgatgtatcatgattgaccagatttattggtcaattcatgataacacaacaattgaataaacgagccagcaatggctggggcttgattcccaactgaaagccctaaaatataaaacgagagtttgacacagcttgtgatggtgaaaaatgtgtccggtgcaatg

SEQ ID NO: 36758 - DNA, 260 bp, Unknown
  Description of Unknown: RightRegion for integrase B10759 sequence
aagggcatggcgcggggaaccgctcccgctctgtccgatcgcctggaggccgtgctgcgctagtcggtggcggcctggtcggccagcagggcccgggcctcgccgtaggtcgcctgctcgttgccgttgaccgccttgagcagccggttgaagtaggcccggcgctgctcgtcgcgctcggcgaagcgggcggtcagctcttccatttcctcgaggtaccggcgcaggtcggccagagtgtcgtcgtcgctcgaacgggg

SEQ ID NO: 36759 - DNA, 260 bp, Unknown
  Description of Unknown: RightRegion for integrase B10760 sequence
gtaattgacaaaatcgtattcgaccggagcgcgtggacatttgatgtgtatttcaaaccttgatttattttattcaatcgttgtatatcttttggaggataggcgacccttatctcataaagatatataacagcgcaaaacggggcgacaggctcatcacctgccgccctttcattttgccgggtcagctctgttccatctgagaaatcattctctggaggctctggcgcgtctggtcgtcaggcgcgtcctccatcatt

SEQ ID NO: 36760 - DNA, 207 bp, Unknown
  Description of Unknown: RightRegion for integrase B10761 sequence
gctttgattgatcgtatcacggtatttcaagatcatattcatatcaaatataagtttgtataattttcttatgcgaaagcattactcgtaaataggagtgacagttttaattgtcactcctatttacgagtaaaaggaaatttatcatgaacaagtttttcgtctgattaaatgatatcatttatgacctcacctcgtcaacgtaga

SEQ ID NO: 36761 - DNA, 260 bp, Unknown; identical to SEQ ID NO: 35754
  Description of Unknown: RightRegion for integrase B10762 sequence

SEQ ID NO: 36762 - DNA, 260 bp, Unknown
  Description of Unknown: RightRegion for integrase B10763 sequence
gtccactcacttatcgaccgtatagagctaggcgacgatattaagatttactgggctttttaattatttacctttgatatgcaacacgcgacctctatatgggctgaggtctatagttgcataaaaaaagaccctagagtcataagaccctagggttattttaacatattattttttaattactagcttttgacctacataaattaagttagggttagctatattattatctttagctatcttacgatagtcaacaccgt

SEQ ID NO: 36763 - DNA, 260 bp, Unknown
  Description of Unknown: RightRegion for integrase B10764 sequence
tcactcattaatcatatagacatagacaatgatgacatcacaatctattggaatttcatgtgatgtaacaatcattatatttttttgagttttgatgccatattaggacagtggttttatctattgacctaatatggcatcatttttttatgcaaaagaaaagagccacccacaaaggatggctcaattctcatttggagaaatgttttgtacttcttgcaatgattatatcacaattttttttctgattggagtttttc

SEQ ID NO: 36764 - DNA, 260 bp, Unknown
  Description of Unknown: RightRegion for integrase B10765 sequence
aaattatttgaaaaaatagtatattacaaagatagtgggatgctcacaatcacttataaataaagggaatttttatttgcatatataaagaccttaattccagttaacttccttatatatgcaggaaaggaagattaatgatgaataactattgtatatatataaggaaaagaaaaaacaaaccatattgcagtttgctaaaagaagaaataacgttttcccgttgtaaggaatgtgttaataaagaatataaagaaaag

SEQ ID NO: 36765 - DNA, 260 bp, Unknown
  Description of Unknown: RightRegion for integrase B10766 sequence
gttaccgcgctacacgcgattgcatcggcacagcacaaagccctacaggactgcaccggatgactgggccggacctgtagggcttcggaaccgcctaagcggttctactggcacacacggtgaaaggttaaggccgtgtgtgccagattctattagtcagcgaggctgtaccccgtaccgccaccacggctctttaggcgactctcaactaccttgccagcctcaacgagtttggttcgctcggtacgcgcctgtgtgcg

SEQ ID NO: 36766 - DNA, 260 bp, Unknown
  Description of Unknown: RightRegion for integrase B10767 sequence
atcaagccgacgagcctgcggggacgcttcgaccctgaccgcatcgagctggttccgacctaactcctgggcgacagcggcagccgaagcaggcagatgcgcagcctgggcagatagatccggcaccactgcgtagtcgtctcgggtggcccgggatcgatcggcggcggggtcgtcacgggaggggtgtccggtggtgtactgggcggaccggagggatcgccacctggcggcggcgccgtggtcggctcactgcggct

SEQ ID NO: 36767 - DNA, 62 bp, Unknown
  Description of Unknown: RightRegion for integrase B10768 sequence
aaagaggatggcgcggtagttgttgttttcaagggtgggattgagactgcaattgagggatg

SEQ ID NO: 36768 - DNA, 97 bp, Unknown
  Description of Unknown: RightRegion for integrase B10769 sequence
aaaaacctgatagataaggtatttgttaaacctggcatcattgatataaattggagaatttaggtcagaaaaataacaaatttagatactcttgttt

SEQ ID NO: 36769 - DNA, 260 bp, Unknown
  Description of Unknown: RightRegion for integrase B10770 sequence
aaaaatctgatagacaaggtatttgttaaacctggcatcattgatataaattggagaatttaggtcagaaaaataacaaatttagatactcttgtttcgaccagtgtaaaagcttttgccttcgcttctttgaacttcatcatcatttttttcatctaaaaattcacctccatattttgatacatgggcagcaacatagctgcgtacaataaaacgattagtagggctacaaaaataaataccatgggttgtactagatt

SEQ ID NO: 36770 - DNA, 260 bp, Unknown
  Description of Unknown: RightRegion for integrase B10771 sequence
gacgggatcgtcgacctcgacttcgtcgacatcatcccgaagaagctgcccggcgatgcctgagcctgagcacatcatccaagccatatgcaacgacccgcggcacgcacgcggcaaggtggcgaaggtggcgacgttcggccggttcaccttccctcacggcgaggtccgctggcttatcctcgatgccggtgagtggcgctacacgcggcccgacccgaccggcgtttaccggcgttacggcgcccacgacgaggaca

SEQ ID NO: 36771 - DNA, 96 bp, Unknown
  Description of Unknown: RightRegion for integrase B10772 sequence
aaaaatctgatagataaggtatttgttaaacctggcatcattgatataaattggagaatttaggtcgaaaaataacaaatttagatactcttgttt

SEQ ID NO: 36772 - DNA, 260 bp, Unknown
  Description of Unknown: RightRegion for integrase B10773 sequence
atcaaagagttttcaatgggtgaagacagaaaagtggacccggaaagtattatatttttttaactaaatgtgcgtacttttcggggcgcaccgttcggtgccagtataaaagtacacattaaaaaaagaccccggagggcttaaagcctcccggggttttctctgttcttatgttctttcgtgctgagtgccgaagtagaaggccatcaccgtggaggtgatcaccatcacgttgtccggtgtgatgtcgccacgaagcg

SEQ ID NO: 36773 - DNA, 62 bp, Unknown
  Description of Unknown: RightRegion for integrase B10774 sequence
tttatcgataaaatcatcttcaatcgttccctatcttccgttgagttatttttctgtttttg

SEQ ID NO: 36774 - DNA, 260 bp, Unknown
  Description of Unknown: RightRegion for integrase B10775 sequence
ctgattcagaaaattattttcaacagaaaaacaagtcaggttgttattttttatcagttctgattatcagtttttacagattggcggactaaattgtaaatactgataatacatagtgaaaaaacacaaatccctgccatatcattcaggcagggacttttttaatcgtatcaaacgcaaaaagcaataaaattgcgttttaggagatttttataagagtgcttttcgcaattttttttaaatttattgttcattttgaa

SEQ ID NO: 36775 - DNA, 260 bp, Unknown
  Description of Unknown: RightRegion for integrase B10776 sequence
tacaatatccgagaaaagggcccgcactcacgtgttcgagtacggcccgaatggtggagctgacgggagtcgaacccgtgtccgaaaagaaatcagttagagtatctccgggcgcagtgtgcttattaaatttcccttggtgcgggcgagcacacacgcactacaccttggtagcttcataagttcatgccgggccgcaaagcttaagcccgttcacgttcagtacctaatcgacgccctgaccccatgcggtactaaca

SEQ ID NO: 36776 - DNA, 62 bp, Unknown
  Description of Unknown: RightRegion for integrase B10777 sequence
tacaatatccgaaaaaagggcccgcactcacgtgttcgagtacggcccgaatggtggagctg

SEQ ID NO: 36777 - DNA, 260 bp, Unknown
  Description of Unknown: RightRegion for integrase B10778 sequence
ggtgcgtacgaactcgtctggcgggatgtgttcgcggaagccctgacgcattcacgcagctagatttattcctgaagaaggcgggatacgtggaaggaccgggggctcctcgcatgagtccccggtcccctgccccaacaccgacagccgggccaccctacgtccggctgttggctacccgttcattggcgcggtgccggagccacaggtacgccatgtgcccccggtgcttcgcgccgagttgccactccgcttgcagc

SEQ ID NO: 36778 - DNA, 260 bp, Unknown
  Description of Unknown: RightRegion for integrase B10779 sequence
cctatggagcagattaagtttagagttaaggataagtcgatcagttcacccgttttgagatagtcacgaccaaggcggctcaaatccttagtgataacaattcccactttgccgtcctcgatgtcagccatcatcgctttaaaaccgtcacgctcccaagtcgttccggacactccgtcatcaacgtagtaagccgtgttgcggaaaccattatcatcggcatacttcttgaggatagccttctgattggtgatgctgtt

SEQ ID NO: 36779 - DNA, 260 bp, Unknown
  Description of Unknown: RightRegion for integrase B10780 sequence
atcctctcctatatcgtgtatgaaaaagccgaccgccgcctcgccctttatttttacccgtgatattatcggtttttgcaatacggtggcccggattgtaaaaaccgataagttttccacatgagcggaaagcttatcggcaatgacagtataccacttttctccaaaaacacaagacgccgcccagagagattgtctccaggcggcgtcttgtttattctgtctgtttttcgttattgatatcggctttttcgttatca

SEQ ID NO: 36780 - DNA, 260 bp, Unknown
  Description of Unknown: RightRegion for integrase B10781 sequence
gctttaattgaccgcatcaccatcaatcaagcgtctatacacatcaaatatcgctttaattaagtttactcgtaaccatttgtgacaatcttgattgcaactaatatacacgagtaaatttgaaaaataaaaaggacggctcccgatcagagaaaagcatcctcacaagatgcctctctcatcaacgagaaccgtcctcttttcgagtttattgtgttacatggagaaatactcgcctatcaccttaaaagccgtcagaa

SEQ ID NO: 36781 - DNA, 260 bp, Unknown
  Description of Unknown: RightRegion for integrase B10782 sequence
ctgccggcgtccaagcgcgggccggggttccgggtgcaggacgtgcgcgtggaagagcgctaggcgccacagtcggcgccgatcttgtccagggcggcctgggcgtccttgacgtcctggtagacggcgctacccggcgtcaccgcgtccatggacaggaacgacagcttcaccgccgcgagggccgcgtctatcgcgatcttgccgcgcgacgtgtcgcgaaggccggagatcagcgtggtggcgccggcgtagtcctg

SEQ ID NO: 36782 - DNA, 60 bp, Unknown
  Description of Unknown: RightRegion for integrase B10783 sequence
gaggaaatgattgcagaggacaagcaaatcaaccatgccaaaaggatgtcagttcaacaa

SEQ ID NO: 36783 - DNA, 260 bp, Unknown
  Description of Unknown: RightRegion for integrase B10784 sequence
aaaaacctgatagataaggtatttgttaaacctggcatcattgatataaattggaggatttaaggttgaaaaataacaaatttagatactcttgtttcaagtagcgtatctaaaactcttatctaaagaatacaataaaaccgcaggttgttgcctgcggttttgtgtaatctattttgaagtctttctattgttatttggtcgtagtcgtaataagcccgtcaggctcaacagtaaatgcagccttatcggccatacgt

SEQ ID NO: 36784 - DNA, 219 bp, Unknown
  Description of Unknown: RightRegion for integrase B10785 sequence
  modified_base (176)..(176): a, c, t, g, unknown or other
agagagcttattgacaaggtgcaagtgacttccgataagatagttattaactggaagatttgagaaatttactatccttcatttcaatcagcgtaaaagcttttactttgagtgtacgcaatgatttcataaaggaacctccaaattttcataaataggcagcaacatggctgcancagcgtaaaagcttttactttgagtgtacgcaatgatttcata

SEQ ID NO: 36785 - DNA, 260 bp, Unknown
  Description of Unknown: RightRegion for integrase B10786 sequence
actcgccgtggccccgggttcgacccggcaagcgtccgtgttgagcgtgtggaagttacatgacgctaacagtgagactcaggtcacgtagcggagcgtaactcaaacgagatgcggtgagccgtagcgctaccccctgttgtaacgatcaagtgggggtaccgaccgatccacggggtggtgacaccggccggcacccttgccaatccaacgaggcggggaccggtgagttacaggtgagttacgagctgggagagaac

SEQ ID NO: 36786 - DNA, 260 bp, Unknown
  Description of Unknown: RightRegion for integrase B10787 sequence
tttgtcgaaaagatcatattcatgaagccaagcggtcgcattgagatcgtttatcatttgtgaatctggttatatctttttggtgctgagaccgccgagcatcaaaaacatataaagcaaaacacgcccgacggagcaagcccgccgggcgttgtcaatgtaattcgcttgtacaagacttgtatttgacttgtatcagaagcaaagcgccgcctgcgtctgcgggcccgcgatgccgtcaacctcaaggccggattcga

SEQ ID NO: 36787 - DNA, 260 bp, Unknown; identical to SEQ ID NO: 36786
  Description of Unknown: RightRegion for integrase B10788 sequence

SEQ ID NO: 36788 - DNA, 260 bp, Unknown; identical to SEQ ID NO: 35818
  Description of Unknown: RightRegion for integrase B10789 sequence

SEQ ID NO: 36789 - DNA, 260 bp, Unknown
  Description of Unknown: RightRegion for integrase B10790 sequence
actctgatcgatagaatcatcatcgatggtgatgatatcatcataaaatggaaatttgcataaatagaaaaaaccgcatgacattgtgtttcatgcggttcttattttttacgcaaatagacccttttattttaataaccaaccttatttacaaaaataatatgagcagatgcagagtcatttgcttttcttctgcctctgaggcttgttatttgccctctaaaatccattttagcttgttctgtaagtatttctccatt

SEQ ID NO: 36790 - DNA, 260 bp, Unknown
  Description of Unknown: RightRegion for integrase B10791 sequence
cggcggatcgagcctggccgggtggatctgcggtttgggccgcaggttcctgatgtgctgtgaggtgcggcgccggggcgtgttgccccggcccgctgcggttgcctagctggcgcgcgaatgggccgaccctggctgcccggggtcggcccagttctgcgtccacgcttcggagtcgaggcaggcctggaaggtttcggtcatctcgcgggcggctcgcggggagatctcgccttcgacgaacgtgaggacgacctcgc

SEQ ID NO: 36791 - DNA, 260 bp, Unknown
  Description of Unknown: RightRegion for integrase B10792 sequence
atcgccgacaggatcacctttatcaaacccaaaggtataatcgagattttttataagatctaatacatatctttttggtacttagaccgccaaacctcaaaaagatatattgatcttaacggtattatatttataagtataacacaaaagccgggaacaatcaatgctcccggctgcattatttgttgaattctttttacatttcctccaacagtcccgaatacaaatggtcatccagctccacggtgatcttcacagac

SEQ ID NO: 36792 - DNA, 260 bp, Unknown
  Description of Unknown: RightRegion for integrase B10793 sequence
cggaaggatttcgtcaatcgttacgatgttgaccttgatgtgaccatcattttcggttcttaatcgtgtttatgatacatctatgcccatagatgttgcaaaaacaagattaaaccccttttaaggcacttaattagcccatacagacaaattaaaaacctgcacgataattgtatcatgcaggtcattaaaaatgcaatacagacgattttgtgaggttgtttttccccttcaataaaattctgcggtgcgaatgttgt

SEQ ID NO: 36793 - DNA, 260 bp, Unknown
  Description of Unknown: RightRegion for integrase B10794 sequence
ccgatccagccgatctggatcgacgaccctgacgacccacgcacgctccggatgcagggctgacagcatccgctcccacgcccgggcagcgttccccaacgcagcttcgacgtactcgctcacgccgccatcctccgctgcgtcctgcgccgcatccgctccgccaccaccgtgatctcgtccgccaacaacagcgcctccgccacgtcgatccgcagcagacgctcttggtcggcggtcaccacgatctcgtcctcgcc

SEQ ID NO: 36794 - DNA, 260 bp, Unknown
  Description of Unknown: RightRegion for integrase B10795 sequence
ttaaatctaataatcaaaaaaataattattcattcttataatgaaatagaaattgtatattaaaaactcactaaattaatagtgagcttttttttatttattcacgaactatctcttgaattcctttttctttcaatttttcatatgttgtttcatctatcaagatatctacatcatcgtttccatcgttaaaaatatacacatattcatctgaattcaacttcttttgttttcttatataactgtattcgtttgcaaac

SEQ ID NO: 36795 - DNA, 260 bp, Unknown
  Description of Unknown: RightRegion for integrase B10796 sequence
  modified_base (91)..(91): a, c, t, g, unknown or other
gagattgtggtatcaagggttgaagtaactaagaatggcattgatatttttttcaatttttaaccctgttttactaccaagtattaaaatngctctgcctccattgaaagccgagtggcagacatccatgctgccttcgcagatgagtccgttgatgccattctggctactatcggcggtttcaactgcaatgagctcctgccctatctggactttgagttgattgctagaaatcctaagattttctgtggctactcaga

SEQ ID NO: 36796 - DNA, 62 bp, Unknown
  Description of Unknown: RightRegion for integrase B10797 sequence
agggcgctaattgaaaaggtacaagtgacatctgagcgggttgtcataaattggaggatata

SEQ ID NO: 36797 - DNA, 260 bp, Unknown
  Description of Unknown: RightRegion for integrase B10798 sequence
aaagaacttcccttggaaactgaaacaaccgtcgaaaccgtgtgtctactttctaggaaataagctggtttgctgacttgaaatgcggaagttcagtcgatttgccacccatttgccacccgcaaaaataaaatagaccgattttcaagaaaagcggctgaacactctgaactaaaatgagatgttcaaccgcttttttactatgcttttttgtgaatcgcattctcgaatacatcaactgccgtttgctgcatcagctc

SEQ ID NO: 36798 - DNA, 260 bp, Unknown
  Description of Unknown: RightRegion for integrase B10799 sequence
tccactctcattgaaaaggtggaaattgacggtgaagacatcagaatacattgggctttctgatgtcttaatgtgcaagtgtttttatctcgctttgttcaaatataattacttgcaacacagacaaaccttgatgcaatagcattctacaacaaaatgaagggattgggaagattgaaattcaaaattgataacggaattacaataatatccaccggtgatgcttcaggtggaaagaaaaacaaaaacggatatgcagg

SEQ ID NO: 36799 - DNA, 62 bp, Unknown
  Description of Unknown: RightRegion for integrase B10800 sequence
gatggaaggtccgccgacgtgtacccctcatggggtgggcttccatcccgcgtctcctggta

SEQ ID NO: 36800 - DNA, 260 bp, Unknown
  Description of Unknown: RightRegion for integrase B10801 sequence
caacttattgaccgcattgacattgatggtgatgatgtcattattcactggaattttgcatgatttttgcaaaattaggcattataatgcccataattgcaaaataaaaagcgcaccacttaaggtgcgctttagatttctaatttagcaacttactgaagtaaactgcatcattgggtattctccggatcataagattggaacacttcaaatgtgacaactgcacctgctttttcaatgggtgtggtaagtgtcacagt

SEQ ID NO: 36801 - DNA, 260 bp, Unknown
  Description of Unknown: RightRegion for integrase B10802 sequence
cagctgattgaccgcattgacattgatggtgatgatgtcattattcactggaattttgcatgatttttacaaaattaggcattttaatgctcataattgcaaaataaaaagcgcacctattaaggtgcgctttagatttctaattgaacagcttactgaagtaaactgctccattaggtattgtccggatcataagattggaacacttcaaacgtgacaactgcacctgctttttcaataggtgtggtcaaagtcacagt

SEQ ID NO: 36802 - DNA, 62 bp, Unknown; identical to SEQ ID NO: 36767
  Description of Unknown: RightRegion for integrase B10803 sequence

SEQ ID NO: 36803 - DNA, 260 bp, Unknown
  Description of Unknown: RightRegion for integrase B10804 sequence
cgcctcctcattgcccgcgtgatcgtgcaccgcgcctatccgccctgcatcgaatggttgtaaccgtggcaggctcttgttgttgtgcatagcgcggttatccgcccatactggccacgggcacatacccgccgctggcgatgacgccgcgccaatacgtgcagtccccctgggtgcactccgagccgccgaagcacgtcacctcgataagcgcgccggccgcgttgcgccggaatatcgcgccgccacacatcccgctc

SEQ ID NO: 36804 - DNA, 214 bp, Unknown
  Description of Unknown: RightRegion for integrase B10805 sequence
aaatatattaaggcaattaagctagatacagagggtaagatagatgagattatatttttttaatagtagtgctactaactgcgccgttccgttcggccctaaaaatccgtacacttttcctttttccaagtgaaacgataaattgtcaacaacggtgacatcatcatatattttcgataaattttcaacttttatcattggctgatatactcct

SEQ ID NO: 36805 - DNA, 260 bp, Unknown
  Description of Unknown: RightRegion for integrase B10806 sequence
aagtatattaaggcaattaagctaggcactgacggtaaactagatgagattatatttttttaattgtagtgctactattcatgccgctccgttcggcacacatataaaagtagcacaactataaaggagctggaaacgttgaaaaataaggatattgagacacgtttaatagaaatgtatataagaggatggataactaaagaggagctggaggagaagctggataagttggatgagacagacaagccagatatgccaga

SEQ ID NO: 36806 - DNA, 260 bp, Unknown
  Description of Unknown: RightRegion for integrase B10807 sequence
aagtatattaagactatcaaactggacacagagggtaaaatagaggagattatatttttttaattgtagtgctactaactatgtcgcaccgttcggcacagtatagaaagtagcactactaaaagggagctggaaacgttgataagacaggacatagagaggcaaaaagaaagactgtttacaatgtatataaaagagttaatcacttatgaggagcttatgttttacttaaataagttagatgagccacttttaaaaga

SEQ ID NO: 36807 - DNA, 260 bp, Unknown
  Description of Unknown: RightRegion for integrase B10808 sequence
agacgatgggaggataagccaaccgtccaccccgtgccgggtggtttcgtgatggtggcctagaggttggagtgccaatagccgccgtcgtcgtcggtgacttcgcagacgcacagcatgaccagcagcatgaccagaatggccacaacgacggctcctagcacctccatgcgatgccctccttcgtccacccctgcctggcaagggtgtcgtactcgttcctgtctgcggtgtagatgtgcctgtcgtctcggcatagc

SEQ ID NO: 36808 - DNA, 260 bp, Unknown
  Description of Unknown: RightRegion for integrase B10809 sequence
gttaagaaagagggaaacagcaggaaaaactactcccttaacttcaatatcatttttgcctagttactgcttttatatcccttttcctttagcagaatagttacagaaacagtaaaaaagcccctagaacgctgtaaaagcttcataggggtgtttttatgttctacgcaataacttataccaaaagacttttaaaaacgcaatacaggacattttggagtgtgaaaaaaggcaggggctttttccctgcctttagattt

SEQ ID NO: 36809 - DNA, 260 bp, Unknown
  Description of Unknown: RightRegion for integrase B10810 sequence
atcttgaaatgcatcgttttcgaccggaagaccgagcattttgattttcaatattatgcatgaaatagcggagaaccttgaaaaataaggctctccgcttattataggttactgcactttagaccgccatagcgcggtaacctatgatatcattttttcttcgcgttctttctccatctggcaaaatcttcgcttgagaaaattctgctcccgcctaccctgagacgttccagctcaatctcgatcttcgcccgttcatc

SEQ ID NO: 36810 - DNA, 260 bp, Unknown
  Description of Unknown: RightRegion for integrase B10811 sequence
gatttaataaacaaaattacaataactgatgatgatatcactattcaatgggcttttatttaattatttttcctatgtgttatttataagctacctcattagcctaaaataaacacctacgaaaaaacgcaaaaaaagaacctacctattatataggtggttctaagctttagcgagtaggacgataaataaattataccataaataaatcatttgaattaaactgcgtatattataagcatcacatttaaaaggagaat

SEQ ID NO: 36811 - DNA, 260 bp, Unknown
  Description of Unknown: RightRegion for integrase B10812 sequence
aataaggtgaataatgaggtgaaaagtttaacatataacagcttcaagagaaaattcacataaaaaaatgcacctattctaaagagctggtgcataaaaaatgcacctattctcacgaaccagtgcattgataaatgtattataatttaatgaatacaattataatatagtattgttgtgttaagaaaatcaattttaaattattaattttagttaaaaataaaaataatttttattgaattatttttgttccgatatct

SEQ ID NO: 36812 - DNA, 260 bp, Unknown
  Description of Unknown: RightRegion for integrase B10813 sequence
atagtcgacagaatcgtctatatcaagccaaaaggcatcatcgagattttttataaactgtaaatcatatctttctgacatttggcggtcttaactccacaaagatatataagaaaaagcctcccctttttgtaagaggaggctacaagcattaatctataagtccgctgaattcgtggtcggttatgagagcatcgtcgaggtacaccctcaggcggtgctttttttcttccgcagctttccagttgttgagttccgct

SEQ ID NO: 36813 - DNA, 150 bp, Unknown
  Description of Unknown: RightRegion for integrase B10814 sequence
cataccaaaggtaaagggtatcgtaatcaaaaaatacgaatagcagatgtgagcttttattaaaactcaatctgcttaaatttattcgtatttacgttacctttactacgacaaaatgttcctgattaagtgaagtcatatcaggcatta

SEQ ID NO: 36814 - DNA, 142 bp, Unknown
  Description of Unknown: RightRegion for integrase B10815 sequence
gctagtatcatagataaagcctacgttttggataagaaaatagttaagatagattttttataacctcagttctcataaatgcacctctccgttttgtcctatataacccactatactaccttcttcaatattaaaagagata

SEQ ID NO: 36815 - DNA, 102 bp, Unknown
  Description of Unknown: RightRegion for integrase B10816 sequence
aaaaatatcataaaagaaattattgttacaaaagatggtatgtcgataacgctagatttttaaagggtctagcgtatttctgtattttagtcaaagtaatta

SEQ ID NO: 36816 - DNA, 260 bp, Unknown
  Description of Unknown: RightRegion for integrase B10817 sequence
cagccgggcggtgtgcgggggaagttcgacccggcgagggtggtcaccgagccggggcgctagccttccgcgctgcacggagggtcgaacatcatcccgctgcgcccctcgctgatgcactggagacacgccacgtactgatggccgtgggagcctgggcccttcctggctgtagcacactcgcagctgtggaatccgcagagcacgcggttcggcaggaagcggccttgcgggttccggccgtagcgcagaacgtggcc

SEQ ID NO: 36817 - DNA, 105 bp, Unknown
  Description of Unknown: RightRegion for integrase B10818 sequence
aaatctgtcgtaaatgaaattgttgtaaccaaagaagaaatgacgataacgctagacttttaaaggtttagcgctatttttgtattttagtcaaattgataatga

SEQ ID NO: 36818 - DNA, 162 bp, Unknown
  Description of Unknown: RightRegion for integrase B10819 sequence
aaatctgtgataaaagagatagttgtcacgaaagatgatatgacgataacgctagacttctaaagggtttagcgcctttttgtattttagtcaagtttatcatgataactttattatacatattttcttcctcctacttatctattcgtaggaaatcaaaaa

SEQ ID NO: 36819 - DNA, 260 bp, Unknown
  Description of Unknown: RightRegion for integrase B10820 sequence
gttgaggccgtggtgctgcgcttggacggctgcggggctatctcctccttagggttaggctagccgctagcgaaccttcatcagtggatcacgaccgctaccaacacccgcccctagccacgcgtcagcgctttggccgcaccttgaccgcctggtgcaaccgcaacggatggatccacagcacgctgcatgagtggggtgagcaggccggcttcccggccgtgcgcgacagcagcttcaacaaactgcagaacgccaag

SEQ ID NO: 36820 - DNA, 260 bp, Unknown; identical to SEQ ID NO: 36433
  Description of Unknown: RightRegion for integrase B10821 sequence

SEQ ID NO: 36821 - DNA, 260 bp, Unknown
  Description of Unknown: RightRegion for integrase B10822 sequence
tggactcacagtccagtgctcccgtccgcctcaaaacctcgagcttctcgcagtcgcgcatagcgcgccatcgaaatatctcatcgagagtcctgccacagccaatgcatattgtatcacataagatacaatttccagtgcatgggcttctaaccattcagcttcagcaggaactcatccacgagcttcctggtcgtagccagtccggacagagtccgaaacatagtcagccgcactagcgatccagacgaattcctgcg

SEQ ID NO: 36822 - DNA, 260 bp, Unknown
  Description of Unknown: RightRegion for integrase B10823 sequence
tcggcgctcattgagaagattgttcttgatggcgaaaacatcgaaattcattggcgtttttagttttgtctttttttactccgtaatgcgtttatgtcgttagataataccatattacggagtaaaaaggaaaacgcccctcggagctatgtctcgagaagcgtcttcagaaagaagaaaagtatataactaattcaagtattttgcggtgcagccgctactttttttaaccatttcatattttagcccctttctatact

SEQ ID NO: 36823 - DNA, 260 bp, Unknown
  Description of Unknown: RightRegion for integrase B10824 sequence
actagaaaaatgcagatcgtgcactttgaagtagtaacacgacccgcattgtatcttttgtaaacattacatgttaacaacgtgtaattaagtgaataagaaatgaattatatttcagtttggttaagacgcaacgtgttgtccttctgttatgttataagtaaatgttgttgtgcatgaatgttctccgtcatcaaatgtcaatgttgctgtcccacttcctgcttgataaatagaaacattcacaccagagatgtatg

SEQ ID NO: 36824 - DNA, 260 bp, Unknown
  Description of Unknown: RightRegion for integrase B10825 sequence
tgtgccttgattgacaagatagttcttgatggcgatgacatcaccatccactggaggttttagccattaatcaaagattccctccgcaatattgtctatatggtcaaggcaaaacatcattcgtcattctcaatcaactcctccatgctacaattcaacacctttgccaatttatgcacagtttgtgcttgtgccttgtttattgatctgactccttgctcatagtgttgaatcatttgaatgttcacaccagattcctt

SEQ ID NO: 36825 - DNA, 190 bp, Unknown
  Description of Unknown: RightRegion for integrase B10826 sequence
ggacccgcggcaactgtggagttcacatcacgatggggaacgtcggcagttttgcgcgtctaatgggtatccgcccacccggcgatctgatcctctggcgacggagcggccacctcgatgcagctcacgcgtcggcgccgcgctggcctctcctgacacagcacagcccccacgccgtcgggcgcagggg

SEQ ID NO: 36826 - DNA, 260 bp, Unknown
  Description of Unknown: RightRegion for integrase B10827 sequence
gagttgcgggtgggtcgtgtggatgagttgcggatccggttcgaccgggcggcggtggcgtgatgagcaggtgggacgagctgatgcagaagttggacgagggctggacggcggaggcggcggagatcgacgacgcggtgacgcgggctccggtgccggagggcgaggagttgacgaccttggccggcctcttgaagcccgtgaccgaaccgtgatgtttggcgtgcggcggtgtgctggtgtgcatcgccgcaggtcag

SEQ ID NO: 36827 - DNA, 260 bp, Unknown
  Description of Unknown: RightRegion for integrase B10828 sequence
ttcgatcccagcaccatccagctggactggaaggtgagcgaggccacagccgttgctgcgtaatgacttacggctcagccccgtcccttctacgtacgtccacaccacccactgaaaggctcagaagcaatgcgaacggctcagctcctcctcacagccgctgccatcggcgcggcagccatcaccctgactgcctgtggctcacaggctgcgccagccaccaccatggccagcgacaccacccacacatacacagtcgg

SEQ ID NO: 36828 - DNA, 260 bp, Unknown
  Description of Unknown: RightRegion for integrase B10829 sequence
gacaaaattgtttttgataaatcggctcaaacattgcatttaacatatctttaccaaatgtgattaggtccgcctaatttcttttggtaaaaaaatagacctcctaaagtggaggtctaatcaaatatttttcttcaatacattgtaaagttctaaaaaatctgcatagtgattatgttcgtttactacgtctaaaaatttatcatacttttggtggaatttgtgatgacagttgctgcacaacaaagtgcaatgctgca

SEQ ID NO: 36829 - DNA, 260 bp, Unknown
  Description of Unknown: RightRegion for integrase B10830 sequence
atcaagagtttcaccatgggagaggacaggaagattgatccagacagcattatatttttttaacattttacttgtactttttacatagccccgttcggtgcatatataaaagtacgacaaaaaaggccggggattattccccggctttttactgtttgtgcaggatattgattttttcgtcaatgccttccaccttctgttcaagggctggcattctttttgcgaagttgttatgttcacgcacttcccgtgttagctca

SEQ ID NO: 36830 - DNA, 260 bp, Unknown
  Description of Unknown: RightRegion for integrase B10831 sequence
tcggtaattgatgaaataaaagttgatgtgttgaacaaagaatttaaaattaagtttatataaacccattttcaaatgggtttaaaacttacctatactttgcttaacattcctgctccagttggagcatactatttaaacaaaatttttaaatgagagaaaacagctttaaatgctgatataataggcttaaggagtgattcatatgggtaataatagagacttatttaatcttgcaaagaattatgtaatggtttttg

SEQ ID NO: 36831 - DNA, 260 bp, Unknown
  Description of Unknown: RightRegion for integrase B10832 sequence
tctctgattcgtaaaatagttatatatccggataccattaaaatattctggaaatttatataattcgtacgcatggtttcaaccatgaaatcattttatataaatacttaaactgtcacttcatattaaacattcacatgcattgactagacgaagaattactaatattttttgtttacattttatcctattggtaatataatctaatggtaaacattggcacgatacacaggagagcaatatggacgcaatttgcacta

SEQ ID NO: 36832 - DNA, 260 bp, Unknown
  Description of Unknown: RightRegion for integrase B10833 sequence
cgttcgatcgtgaaggaaatcaggatggatgcgtcaaagcagctgaccgtggaatttgcgtagtagttaaaacccccatccgttaggataggggtggcagatactacaaaaatagagggcggtctatgccgcccccagaaagtcgagttcataatctttttgttcttttgccgtcagcccccggtcgtacaccagaatgtcgtggtatctgcctgtcggatcgtcttgacgttccacaacgcctttcggctggcatccgg

SEQ ID NO: 36833 - DNA, 260 bp, Unknown
  Description of Unknown: RightRegion for integrase B10834 sequence
attaataatgtaactgtaacaagattggttgatgatatagatatttctattaattttttatagttttttgcagataatttttattctgtcttcaagaaagtaaacttcaagaaggtcaaattaatttagaacttgatgggtattatcaatattggaattatgctgagaaaaaggggtatagtggaacagctatattttctaaaaaagaacctattacagtttcatatggaattggaatagaagaacatgataaagaggga

SEQ ID NO: 36834 - DNA, 260 bp, Unknown
  Description of Unknown: RightRegion for integrase B10835 sequence
gagcctgacggtctgcccggtcccggtcggcgcaacctgccgctcgtttccttcgattggtaggcgcttgcctcccttgcgcttttccatgatgcgggcgtaggtttcggccacttcactcacagcgcaacctccagggcaatgaggatcacggccatgcctacaaacagtgcgatgaactgccaagcccagagattgtctggcgggatcatgggcgcgtcagcctttcgaagccggcttcagtcaagtgaaatggtcca

SEQ ID NO: 36835 - DNA, 260 bp, Unknown
  Description of Unknown: RightRegion for integrase B10836 sequence
atcagccagcactcatctgactgccagggcagagacagggtgatgattgagagagccatctgaccctggctttacaacctgaagaatgaaagaacccccagggatgatgccctgggggttcttctctttcctgtgtccatcactactcaggagaagccagcataaaccttctcccagccctttaccagcctggctcagatggtctaccgtcctgggcatgctctcagatgctgcctggctggccagagagagaaccagag

SEQ ID NO: 36836 - DNA, 260 bp, Unknown
  Description of Unknown: RightRegion for integrase B10837 sequence
atggtagcgggggcaggctatggactcaatctcatcgccagcccgctacggctaccgctataagggcgcgcattctaacctcagaaccctaaaagaaaaagagcccgcccctttcggggcgggcgttctttcgcttgcgaaacctaccaggcccagccgatcaggacgcgtgcctccgaacctccctcgcgtaatgcgctcacttcgacgccgaaacgcaggcgccagatgtcgcggtgcacgaaaacaccataggcctg

SEQ ID NO: 36837 - DNA, 260 bp, Unknown
  Description of Unknown: RightRegion for integrase B10838 sequence
gtgagcgatggagcagtgcagcaggtgcggctaagggccggggaggcggctgcccatccttaggggtaggctagccgctagcgaagcacaagcattggatcacgaccgctacagccatccaccgctagccacccgccagcgctttggccgcactctcacggcttggtgcaaccgcaatggctggattcacagcacgctgcatgagtggggtgagcaggccggctttcccgccgtgcgcgattcgagtttcaacaagctgc

SEQ ID NO: 36838 - DNA, 260 bp, Unknown
  Description of Unknown: RightRegion for integrase B10839 sequence
cttatttccacagtaacattaaatagagactccgaccctgtaattgaatggaattttttttgattcttcttcattcttataggtaatcggtaagagaaaacataatcagaatgaagataaacaagaccccgtcatggggtcttgttgctttatttagatggatttctatagattgaagtcaacttataataaacatcaataggggttttccccggatttctttcgtaattcaaaagtgtttgcgaggacacatttaccat

SEQ ID NO: 36839 - DNA, 260 bp, Unknown
  Description of Unknown: RightRegion for integrase B10840 sequence
gaaagcattgaatatactaggcttaaagacgacgtggcgcttaatataaagttattgttataattttcctcttgtagcaataattttttatgtgatatagtgtaaacataaagacacaactacataggtgtataaatgtttacactatttttttcgtcgtgttgctgccgtgcgacgtaaaactataacggcgaggtttcgcttagcccctgcatagagtaagcgcggtactatatcgttagcggttatatggtatagtt

SEQ ID NO: 36840 - DNA, 199 bp, Unknown
  Description of Unknown: RightRegion for integrase B10841 sequence
ataaaggaatttagtgttgacgataacaaaaaaataatagaagatagcattgtatttttttaattaaaacgttgtactttttgatgtgcaccgttaggcccgaccaaaccatatatagtgccctttcttacatgaagtgaaatgtcatcaagcgccttgtagttatcaaaatatttcgttactccaaaaaccttaatca

SEQ ID NO: 36841 - DNA, 260 bp, Unknown
  Description of Unknown: RightRegion for integrase B10842 sequence
ataaaagagttctccattgacgaaaacaaaaaaatcataccggaaagtattatatttttttgattaaaaagttgtacttttcggtgcgctccgttcggtgcatgtacgaaagtacaacttttcaggaagtgccgcaagccttgatatatcaacattatacacgaacaaaggacagaattgcttctgtccttttaattttgtaattatgtacggtcaaaatccaagaaagttccgaagtattctatctctctcaaattggt

SEQ ID NO: 36842 - DNA, 260 bp, Unknown
  Description of Unknown: RightRegion for integrase B10843 sequence
gaatacagcaaaccgagcaggaaagacgacccgtcgttcacgataatatatgcccgttcttgaatacctatctttgaatcctttatttataaagggttcgatcataactattcgtctatcatagcccggcggcaggtatcgataaaccactgccgcttgttgtccagtccttcccaaaaggctatgacatccgcttcgtactcccggtgtaaaagcacctgcaccgacttcatggtttttttcgcccacttcttttgagc

SEQ ID NO: 36843 - DNA, 260 bp, Unknown
  Description of Unknown: RightRegion for integrase B10844 sequence
tctttgattgaaaaaatagagataaacggggataacgtaaatatcttttggcggtttgcgtgatttttacgcaaattgctatgtttgttttaatagccgttgcaaatagcgtaaaagggaataggtttaagcctactcccttttttcttataacttgccctcactctttaactgttctacttttctatgaatataggaattaccgccttgtttggtgtaatgttcgtattgttcccaaaaccgctcaatttctgtttctc

SEQ ID NO: 36844 - DNA, 260 bp, Unknown
  Description of Unknown: RightRegion for integrase B10845 sequence
gaacgtgttgaatttacacgtttagaagaaaatgcaagtttaaatataacgctattgctataattttctatttacgcaatagcgtgttatatggtatagtgtaatcattgagacacaaatacataagtgtaacaatcattacactattttattttcgtcgtgtaagctaccgagcgacgttataataactcggtgaggtgtggcacgcccaagcaaagaggtaaaaccccgtaagtgattagacggcggtagctcggtgg

SEQ ID NO: 36845 - DNA, 260 bp, Unknown
  Description of Unknown: RightRegion for integrase B10846 sequence
gtgagtgatggagcagtgcaggacgtgcggctaagggccggggaggcggctgcccatccttaggggtaggctagccgctagcgaagcacaagcattggatcacgaccgctacagccatccaccgctagccacccgccagcgctttggccgcaccctcacggcttggtgcaaccgcaatggctggatccacagcacgctgcatgagtggggcgagcaggccggctttcccgccgtgcgcgattcgagtttcaacaagctgc

SEQ ID NO: 36846 - DNA, 260 bp, Unknown
  Description of Unknown: RightRegion for integrase B10847 sequence
cctttcgttgaggagcagcgtgacggtgcgttagaagggatcgatgaaatggagactgtgtgatgaaaatggataccgagaatttccgcgaagtgccggcccagcgaaaggtggaaatcacgatgacgggcgaagcgcgccagtttgaagctggcggccgttcggtaacgttcgtaccgttgagtatcaagcgccgcagttacagcaaggtgctggtgccaccgccggggagcaagagcgccaagatcaagtcgtcgttc

SEQ ID NO: 36847 - DNA, 260 bp, Unknown
  Description of Unknown: RightRegion for integrase B10848 sequence
tctttgattgaaaaaatagagataaacggggatgacgtaaatatcttttggcggtttgcgtgatttttacgcaaattgctatgtttgttttaatagccgttgcaaatagcgtaaaagggaataggtttaagcctactcccttttttcttataacttgccctcgctctttaattgctctacttttctatgaatataggaattaccgccttgtttggtgtaatgttcgtactgttccaaaaaccgctcgatttctgtttctc

SEQ ID NO: 36848 - DNA, 260 bp, Unknown
  Description of Unknown: RightRegion for integrase B10849 sequence
acgctgatcaggaagatcgtcattgacggcgaagacattattattcattggcggtttgcgtaagttgctaaacagtaagagtccatgttattagagtgtaaatgtttagcagtattgccggggctttatatattccatgttttgggagataataacaatatacagttttaaaggaggtcaccatgaaaaaagttttgttaatgatcatctgcagcatgttgctgatctgctcgtgcggttccaaggttccggacggtttc

SEQ ID NO: 36849 - DNA, 260 bp, Unknown
  Description of Unknown: RightRegion for integrase B10850 sequence
gattacatcgtatacgacaaggcaagtgagcatatcactattttttattctcgcacattataacattttgcaataagtcccaccaaactacaaattgttatagtactctaaaaccgcctattttggggagttttctttgatgtcattttcaagcaatcaacgatgagcgcattcaatctttttccatagcttcatctatcaccctgttaataaatccattcatgctttcgttatggcggtctgcataatcttttattcgt

SEQ ID NO: 36850 - DNA, 175 bp, Unknown
  Description of Unknown: RightRegion for integrase B10851 sequence
tttgttcatcatgtgactatatatgaagatcacattgaaattgtctttaattataaaaacgaactttcagagttccatgataaaactcttgaaagttcgcttttaaatgatttggtgacccagaagggattcgaacccctggccttttgattcgtagtcaaacgctctatccagc

SEQ ID NO: 36851 - DNA, 211 bp, Unknown
  Description of Unknown: RightRegion for integrase B10852 sequence
aaaacattaattaaacgtgtagaagttaaacgtgatgaaatcaacgttatttttaaattgtaaaattacagtatttaggagcacctactagaattgtagtacatgacatagcaaatattccttctttctataattcatttgcaattttattgattttgcgaagtcggtggttaacaccgctctttgttagggtgccttccaagtggtcagc

SEQ ID NO: 36852 - DNA, 260 bp, Unknown
  Description of Unknown: RightRegion for integrase B10853 sequence
agcatcgtggcgcacccatatgtggaagaggccaaagagtatgcagatgaggtggtggcatgacgagcgaggcatatcaaggcaacccaaggttgcgcaatgtgcgcattgaggtgaggggagcggcgcggcaaatcatggacggcactcagcgtgtgaccgtggtcccgctgacgatccgtcgcaaacaaaaccgcaagctgctgactccaccgccaggcactggggccaacgtcatgtccggtggcatggacattccg

SEQ ID NO: 36853 - DNA, 260 bp, Unknown
  Description of Unknown: RightRegion for integrase B10854 sequence
accgaggtccggttcgacccggacggcactgcgtcggtgtcgctggtgcgcggcgatggctgacaccgccctcaccctgacggtgcgggtgcccgtccgcgtcgccgcgccgccgcgtgtggccacccgcgagccggcccaagtagcgcgcatgctcgcactggcgcaccacgtcgaggccggcctcgcgtccgggcggctggtcgaccaggccacggtcgcgcgcgtgctcgggttcacgcgcgcgcggctgacccacc

SEQ ID NO: 36854 - DNA, 260 bp, Unknown
  Description of Unknown: RightRegion for integrase B10855 sequence
cttccggctaaaggtgcggaacgtttcaacgtgcgaacccgtatcgcaatgaacgagaggtaacccaacccaacaaggcaagttcaaacgagaggcccgcacgtttcgacgtgcgggcctcgtttcgtttctaggcatggttgcggcccccgagcccgtagaggcccgtagagaggcttacgaggcctcgtaacgggccatcccaacgaggcaagcaaacggcacggttctacggagcatcccaacggcgggaggcctcg

SEQ ID NO: 36855 - DNA, 260 bp, Unknown
  Description of Unknown: RightRegion for integrase B10856 sequence
ccgatagcgtccaatgccaatcgcatgagcggcagtcgctcctcgcgaggatcatcgtcgtaggtgcaaacggacagcagcagcgaatatgcgtggtagtgcgggcatgctgcggcaatggcgccctgaacctgggtccatttgtcccgaagccgcgcgatgtcaactgtgggcgcgttatcattgctggcgccccagaaagaggtcgcgacccgctcgctgagcgttgcagatttgctcctgatcgtcagaccaagaac

SEQ ID NO: 36856 - DNA, 260 bp, Unknown
  Description of Unknown: RightRegion for integrase B10857 sequence
cataagacggcgaagactcgcaggttagaggatattaagttagatatttatctcctaatatagctccataacatagaggatatgctaccctcttcataggtgttatgatgctttatgttattcaaagccctttatattttaccatagaagaaagattttttcaaaatctaaaactattattgacattcttactttataggtatatactcatactatcgacacaggttaacggatttaatacgaagtaggaagggagagct

SEQ ID NO: 36857 - DNA, 260 bp, Unknown
  Description of Unknown: RightRegion for integrase B10858 sequence
gacattgcacggcatcctctggtcgaggaaatgaaggagtccccggaggagtcttacgcatgagaactacggcgaaaccaaccatgagagctgacaatccccgactgcgcagcgtccgtatcgacatcggcggcgatgcccgcaactacaccaccggccaacagcgggtgacggtggtgccgctcaccatccgtcgcaaacagaaccgcaaggtcatgattccgccggccggtgatgactcgttgctgggtgcaggtggc

SEQ ID NO: 36858 - DNA, 260 bp, Unknown
  Description of Unknown: RightRegion for integrase B10859 sequence
agcatggacagatatgagattccgaagtatacaccgaggagaggcatagaaaaaccagtatgataaaatcataactggttttgtaaaagttatccatttttatgcactacgctatattttgtagaacggaactttatctgatggctcgtgcgtcaaattaatttcacctatcacagactgcaatcactgtcaatggcaagggcttcgccggcataaatgccccattgacagtgattttgtctatgatacagggcagccaa

SEQ ID NO: 36859 - DNA, 260 bp, Unknown
  Description of Unknown: RightRegion for integrase B10860 sequence
attatagaaagaatcgttttctatcgttccacttgcgacatagaaatatatttttatacttaaattcatatctttttacaattagcacctccctaccccaaaaagatataatatccgctgccgtcgcacacggagcggatatttttatctcacattttcgatttttctatcattttgtcgatgtactcctccaactcggctccgtcgtcaatgtcttcggttttatacacttccgcgtccgacatctgcgcgataaacga

SEQ ID NO: 36860 - DNA, 260 bp, Unknown
  Description of Unknown: RightRegion for integrase B10861 sequence
aaagccttgatcgatcggatcgatttcgacggacaagatatcacgatacaatggacgttttaattttttgagataaaagcagaaaatcgctcaccacggttttaaccgtcttgagcgattttcggtttttattacacaacgaaaaaaagagccgagagttattataaaccctcggctcccctttttacaatatagcctctcagacgctcagatttgccctcagagctgttttaatctctcaggcgataatttcctcgtcc

SEQ ID NO: 36861 - DNA, 260 bp, Unknown
  Description of Unknown: RightRegion for integrase B10862 sequence
gccttgatagatagaatagagataggagaacataagaccgttacaatcaaatggtctttttaattattacacattatacagaacgtcgatggactgtttcagtagttcatcggcgttctgtatcttttgtaatataacaaaaaaagacctccgagatattatactcccggaggtctgactatgcacgcagaaaccgccttagagcctcatatttcgccctcagcagttctttactgtctatatgatacaactttaaggtg

SEQ ID NO: 36862 - DNA, 260 bp, Unknown
  Description of Unknown: RightRegion for integrase B10863 sequence
gagagtggcacactgaagttccacttgcacgacaaggagctgctgacaacctcagcggaataggatcacaggagaaaacgtgaatcagcaaagcactggcaccctggaatacgccatccatttcaacaaaggccacaatggccgcaagcaactgcgtcaaggcaaggcgccggaacctgagaccttgccggttggcagcatccagcgggtttcgaaggtgatggcattggcgatcaagatggggaggatgatcgaagaag

SEQ ID NO: 36863 - DNA, 260 bp, Unknown
  Description of Unknown: RightRegion for integrase B10864 sequence
ccgtccgggcgcgggaaccgggtcttccgcaccgagacagtgcggctcatgccgcgcgcctgaccgtcgattcagcgaacattaaccccgccgtgaccgaatgcgaaacaaatcctccggtaactattgccattgcctgaacccagcgttaatgtctcgttacgcgcattaacgctggcatcccgcgcgccgcaattgcgtgccgatcgccgtgcactcggggaggggtgcggttccatgcgagtcaccaggccgctgtc

SEQ ID NO: 36864 - DNA, 260 bp, Unknown
  Description of Unknown: RightRegion for integrase B10865 sequence
tcagttttaatcgactacattagcattgatggtcagaaccttactatttactggacattttaaccattatccaatatcgattatttcttttcgtaaatcatcagtctgtttacagattgttcctttacgagataaatggtttatgttataatatccgtgtgaaggcggatcttcaccagtccgtttcactcccaacttaatataggccggccaggatcgcatggccggtcttttaatttgccccataattgccccacgaa

SEQ ID NO: 36865 - DNA, 87 bp, Unknown
  Description of Unknown: RightRegion for integrase B10866 sequence
aagcaattgatagatagagtcgaggttactatggataacatcgatattatttttaagttttaaaagcattatttaggcactacaact

SEQ ID NO: 36866 - DNA, 260 bp, Unknown
  Description of Unknown: RightRegion for integrase B10867 sequence
gccgacatcgccagccacccgctggtcgaggagtccgcgtcgactgaaggagcctacgcatgacctccaacgcgaagccggtcgcgcggccggtgaatccgaagctgcgcagcgtccgcatcgaggtcggcgacgaggcacgcaactacgtcaccggtcagcagcgcgtgaccatggtgccgctgacgattcggcgcaagcaatatcgcaaggtgatgattccgcccccaggcgaacggtcagtcctgggagcaggcggg

SEQ ID NO: 36867 - DNA, 260 bp, Unknown
  Description of Unknown: RightRegion for integrase B10868 sequence
gccgatatcgccaaccacccgctggtcgaggaatccgcgctgactgaagaggcatgcgcatgacctccaacgacaagccggtcgcgcggccggcgaacccgaagctgcgcagcgtccgcatcgaagtcggcgacgatgcgcgcaactatgtcaccggtcagcagcgcgtgaccatggtgccgctgacgattcggcgcaagcaatatcgcaaggtgatgattcctcccccaggcgaacgatcagtcctgggcgcgggcggg

SEQ ID NO: 36868 - DNA, 260 bp, Unknown
  Description of Unknown: RightRegion for integrase B10869 sequence
ctgatagacggcatcattatccggcctgatgatggcgttgaaatacactgggctttcgcctagtgtatcttgtgcaggctaattatgacctccacatgcatggagtgtagaagtagcctgttttgcccccttgttgttaataatattatattggcgataataaaaaaagaccgggatctctcccggcctctgtttgaaaattattaaaatcctatcgctgccttgtatgtcttcggacctgctactgcatccatgacaag

SEQ ID NO: 36869 - DNA, 260 bp, Unknown
  Description of Unknown: RightRegion for integrase B10870 sequence
cgttctgtggtctctgagatatacatctatccggacggtcgaatcgaaccaaagtttttttaatgcgcatagttgtactaacctatgcgcgccgttcggagcgatgcagttagtacaacttttcagagcacaaaaaaagaggagccgagagatcggctccttaattttttttttttattgtggagtaacgctcatcagtttacagtcgatgacgctagtcgggaaatagtctccggatcggatgcgatcctcaagttcgt

SEQ ID NO: 36870 - DNA, 260 bp, Unknown
  Description of Unknown: RightRegion for integrase B10871 sequence
attgtagataagattgtttttgatcgtaagaaatgtcttttattttttgatattaatttataggttattacagtatggtggacccgatggtaattacatatactaatttggtggagggaattctaaattgttttttcaacttagtagctatactagtcacatttttctaaatacaattggtataaatcttctccaattaaatatttcaacttttgtctctctttataaaatgattcatccacccaggaaggattattaag

SEQ ID NO: 36871 - DNA, 260 bp, Unknown
  Description of Unknown: RightRegion for integrase B10872 sequence
atcaaggagttcacgctggatgataacaagaaaatcgtgccggagagcattatatttttttaaataattgttgtactttttaatgctctccgttcggagcggtgcaaaaagtacaatgttagaacgagcgccgcaggccttggtataacagcattatacaccattatgacaaaagaaaaagccccggaaggctcagccctccggggtcttttctatttcttctcgtgctgggtgccgaagtagaaggcgaccaccgtgga

SEQ ID NO: 36872 - DNA, 260 bp, Unknown
  Description of Unknown: RightRegion for integrase B10873 sequence
ctcattgagaaaataaccgccgataatgtgaaaaaggaaatcactatatatttttacgcttgacgcagcaacgcttctattacttccccagcgtctgcatttataacaatgctgcggtctgctatttcttccggggcgtaggcttccccgtagtttatgcaagcataggttgaaagcctattttcttttgtcagcctatggagtacaaacttaattattacgggggtatttcttaactttgtactccctctcaaatggag

SEQ ID NO: 36873 - DNA, 87 bp, Unknown
  Description of Unknown: RightRegion for integrase B10874 sequence
gatattgagggcatagctccaccaaaaaaaggacttgcttttcagcaggtcctttttccatgaaattcatttctgcgcaacgcgcaa

SEQ ID NO: 36874 - DNA, 260 bp, Unknown
  Description of Unknown: RightRegion for integrase B10875 sequence
ctggaacgcaacgagttcgtggccgagcaacgcgcaccgatcgacgcggagacggtcgaatgagcgacggcatcaaaccgataagggagacgcctgcaggacgccgggtggtagtgagggcttcaggcacgccgcgccagttcgaggtcggcgggcgatccgtgacgttcgtgccgatgttgatcaagcgccggcatcgcagcaaattggtggtcccgccagtaggtacagattttgtgaaggccacttcgtcattcgac

SEQ ID NO: 36875 - DNA, 260 bp, Unknown
  Description of Unknown: RightRegion for integrase B10876 sequence
gacatcggcgcacatccgctggtcgaggaagcccgcgaacaaaccgaggaggcgctggcatgaacaccacggcgaacccgcgcaagcgcaccgtccacatcgaggtcggcgccgaaacccgcagctacatcagtgccgggcagcgcgtcacccaggtgcctttgatcatcaagcgccgccagaaccgcaagttgctgatcccgcctgcatccggtgccgcagacgcgatgggcggcttggacgtgccgatgatcaagacg

SEQ ID NO: 36876 - DNA, 260 bp, Unknown
  Description of Unknown: RightRegion for integrase B10877 sequence
gacatcagcacgcatcccttgatcgaagagtcccaagaacgtgtcgaggaggtttgggcatgaatgccacgagccaccagcaccagcgtgccgtccgtatcgagatcggagccgaggcgcgcagttatgtcagcgaggggcagcgggtcaccttggtgcccctgacgatcaagcgccgccagaaccggaagctgctgataccgccagcccccgaaattgcggaccggatcggtggcttcgatgtgccgatgatcaaaacg

SEQ ID NO: 36877 - DNA, 260 bp, Unknown
  Description of Unknown: RightRegion for integrase B10878 sequence
ctatctattattgataaaatttatatagaaaatggcgaaatacaagaggttacttttttgtaacctctttgctataacccctgttcttttcaaatttctaattgtcactttgttctggtgcaccaactgggcaacattatcaaagtaacacttttttaattgcttaagttaaatccttttttcacaccacttttgtaggcttctatgaattgtttttttaataatttaactaaaattcttttcctccaatttaatccatc

SEQ ID NO: 36878 - DNA, 260 bp, Unknown
  Description of Unknown: RightRegion for integrase B10879 sequence
gaactcgagcgccaccaattcgtggccgagcaacgcgcaccggccgacgaggagactgtgtgatgagtaccatcgaaaagcccacgcgagaaacgccagcggcacgccgtgtcgtggtcaccccatcggggaagccaagggatttcgaacttggcggtcggtcggtgacgttcgtaccgctggcgatcaagcgccgccattccagcaagttgatcgtgccaccaatcggtacgtcgtttgtcagaacgccttccacattc

SEQ ID NO: 36879 - DNA, 260 bp, Unknown
  Description of Unknown: RightRegion for integrase B10880 sequence
gacaaggccatatcggttgaattgaatccagatataggtggtgctctaattcatgttaagtaatcgatgtaatccggacggatcacattatttacttaacaaagccgcctgatttattccatgagaaagccccccaaggtggcgggggcttttcattccttaggggagtctatcgacaatagcatccaagagatgtgctggggaaagttgatacgaattaaagtcccgaaccatattcagtacgaagtcggcatccaccg

SEQ ID NO: 36880 - DNA, 260 bp, Unknown
  Description of Unknown: RightRegion for integrase B10881 sequence
gacctgatcgaccggatcgaatatgcggacgatgatctgcggattttctggaaaatcaaataaaaaaagagcacccttctcggtgctctttctttgtttcgcgattaagtaccatctttaaagattgagtgtcgaatcacgaaaccggtcaaaattcgccgcgatgaacagcaacatccacgccccgccgccgatcatcatcttgacgcctcgctccagatccgccgccagcggtgactccgtgaggcaggcccctgcga

SEQ ID NO: 36881 - DNA, 260 bp, Unknown
  Description of Unknown: RightRegion for integrase B10882 sequence
gacctgatcgagcggatcgagtatgccgatgatgacgtgcggatcttctggaaactgaaatgaaaaagagcacccttctcggtgctctttctttgtttcgtgattaggtcctctctttaaagattgagtcctaaatcacgaaaccggtcaaagtttgccgcgatgaacagcagcatccacgccccgccgccgatcatcatcttgacgcctcgctccagatccgccgccagcggtgactccgtgaggcaggcccccgcgaa

SEQ ID NO: 36882 - DNA, 260 bp, Unknown
  Description of Unknown: RightRegion for integrase B10883 sequence
aaggcgcttgtcaagcggatagagtttcaaggtcaagacatttcgatttattggaatttctgattattgcattttgcagaaaatagctattgacggttttaaccgtgaatagctattttgtgcgttttctcaatctgcaataatagaataacaaaaaaagagccggagatcaatagcagatccccggctcgcgtcgtatcgtgtttagtttagcctcagtcgcccaaattagcccgtctgagccgctttaccgtttaggt

SEQ ID NO: 36883 - DNA, 260 bp, Unknown
  Description of Unknown: RightRegion for integrase B10884 sequence
tctctcgttgaaaaagtagaaatagacggacaaaatgtcgatatattttggaaatttgcataaaacaagcaaaaacggcattaaactgccgtttttgacattttgcaaattattccctttgctttaaccacggtcacaatttgctaataatttaaagaggcaggtgtttcctgcctctttgttatatgttgagtatttccagaacattgcaatcaagagcgattgcaagcttggcaacggtgatcgccgttgctttgttt

SEQ ID NO: 36884 - DNA, 260 bp, Unknown
  Description of Unknown: RightRegion for integrase B10885 sequence
attaaatcagtgaccctctgtaatgaccattctaacatgatctcatctattctatttttataattagttgtaactgcttcaatccacagggaatgaagtagttacaaccaaaaaatatcaggatgttatacctttgtgtgtagtccagtgctttaacatattggttccccggaagcgggaagttaatatgtcaataatcagaaagaaaaaagcggggctaaaaggccccgcttccattacaatatcaactttagaaatgt

SEQ ID NO: 36885 - DNA, 260 bp, Unknown
  Description of Unknown: RightRegion for integrase B10886 sequence
ccggggtggcgtccgggcgagtcgtatttcgacccgcgggccgtagctattgaatggcaatagcctgtcgtgcgggtacatccccattcaattgttaattgcacccctacattcccgtgctttattaatctttatcaaattcaccatcaattgcttgtttcaacctgatcggtgtgtcaccattctcaacaggtcggcaggtagcccgccgacctcggatcggccagaaaccgttgctgggccacaaattcaccagcgat

SEQ ID NO: 36886 - DNA, 260 bp, Unknown
  Description of Unknown: RightRegion for integrase B10887 sequence
gtactcgttacgcacaaggtcgccgagcacctcaacccggacacaatcgaccccgagtggtgacaaagtggcagaactaacgtcattctgtattactttgtcgagcgctctctctctctaacaagtaatacaaagtgacgcttatatcgccactttgtcacccccggcagcctcgggcaccgcccgcaccccctgaaggtgcccgtgagtcgatcctgagcccatggccctctcccctgtcgtccacatcgaaacgacta

SEQ ID NO: 36887 - DNA, 260 bp, Unknown
  Description of Unknown: RightRegion for integrase B10888 sequence
ctggagagaatcgacttccatgacggtcttcccaggatcaccttcgccctaccagagggttaggaacgagaacaccttcctaacccaacggtagagacgacaaaaggccccgtccagggcgattcgggccacatgggccaaaaccaccccgaacggggcagggtgccggttagaacgcaatagcgcccagggcaatccccccgagaaggaaaaaccacctctcgttcgccaggattcggctcctctccttttccctggcc

SEQ ID NO: 36888 - DNA, 260 bp, Unknown
  Description of Unknown: RightRegion for integrase B10889 sequence
attaaagatagaaatcaaaattattttacagaaagttctattaaaaacataatttataagtaaaaataaatttattttaatttaaattatttaattttttttattaaataaattattaaaatataacctatttatatattaaataacataaataaaataaaaagaaaaagaaaaagaaaaataatatatatattaattaataaaaatgaataaagacaaaataactactgaaaaaatgtctgaaaattttacaaattatc

SEQ ID NO: 36889 - DNA, 260 bp, Unknown; identical to SEQ ID NO: 36431
  Description of Unknown: RightRegion for integrase B10890 sequence

SEQ ID NO: 36890 - DNA, 260 bp, Unknown
  Description of Unknown: RightRegion for integrase B10891 sequence
catattgtggtaaaggacgggcggtacggccattttgaccttgacgttatttttttaccctaacattgtattagtacatcgtgccgccaggtgcgtgcgcttaatacaatgttataaataggtagagaaaagcccaggctgcgcgcctgggctttgttgtttatacttcgccgtaggaggttacggcgggatcgtccacgatgtacaggccagacagcagcctaaaccacggctgcccgtccaggccctggacgcgggcc

SEQ ID NO: 36891 - DNA, 210 bp, Unknown
  Description of Unknown: RightRegion for integrase B10892 sequence
cgtatcgtggtaaaggacgggcggtacggccacatcgaccttgatgttatttttttgccctagcattgtattagtacatcgtgccactcggtgccgtccagcctcatgtagaagctgaccgcacaggctgtaccgtcatcgccctcgtagtcatacatgaacagcgagatgctgtcgtcatacgggtacaggttgaacttatacgcatcg

SEQ ID NO: 36892 - DNA, 260 bp, Unknown
  Description of Unknown: RightRegion for integrase B10893 sequence
caatctcttatttattatatcgaaattgacaatgaagaagtaactatccattggaaattctaaaaaggagctgtctacaatgaaagatttactaacactattagcggaaaccttttccaaaatcgaacagcaaaaaatcaaagagtacctaaatactaaataggggatgttggggaaaaccttgtcgcacaaggcatccccacttatgccatatagggagtcccgacttatctgcactccccttatggtatacaccttcc

SEQ ID NO: 36893 - DNA, 62 bp, Unknown
  Description of Unknown: RightRegion for integrase B10894 sequence
cgtatcgtggtaaaggacgggcgatacggccacttcgaccttgatgttatttttttgcccta

SEQ ID NO: 36894 - DNA, 260 bp, Unknown
  Description of Unknown: RightRegion for integrase B10895 sequence
cgatctcttataaacaaagtcacgataaccggacatcgtattcacattgatttcaaaatttaaaatgtactcgacatcagatagtcattccgatgactgtcacatgtcgagaaaggcaaatgaggtacagatcatgacaagaaaagctgctctgttagaagccatagaaattatcaaaacaatagaaattaatccagaacataaagagatcctactcaaaaagttacaatcatgcgccgacgatctgccctataataaat

SEQ ID NO: 36895 - DNA, 260 bp, Unknown
  Description of Unknown: RightRegion for integrase B10896 sequence
ttaaataaagatgaaataaatttaaaaaatgataatttaaaacttcaaatatttttaaattgaaaagctagaggaaaaatctagcttttttatttttttcatactataataaaacataatcaaatattttaagtatgctaagggtagtataaaactaagttcccacctaggcaccattcaatccctcactttttatagtagatgattgaaatatatatatgttagcaatgcctctggatcaaatggtctgaggccttttt

SEQ ID NO: 36896 - DNA, 62 bp, Unknown
  Description of Unknown: RightRegion for integrase B10897 sequence
catattgtggtaaaagacgggcggtacggccactacgaccttgacgttatttttttgcccta

SEQ ID NO: 36897 - DNA, 260 bp, Unknown
  Description of Unknown: RightRegion for integrase B10898 sequence
gaagatacccccgcaactcatggccgtgggggtgtatatgacttccatgttgagttttattaagcatgccttttataccacccgtaaaatgtcatgccctttaggtgatgtcaaattactggtggtaatacttccatccctgttcgggcacgtgactggcaatgcaatcggtagcttatataccttttcgccatacctttcctttagataatcagaaaatactcgatacacttgatgctccattattattcctttcacgc

SEQ ID NO: 36898 - DNA, 62 bp, Unknown
  Description of Unknown: RightRegion for integrase B10899 sequence
atagagaaggtcatagcacataaaacatcagagggatacaactttgaaatcttttataaata

SEQ ID NO: 36899 - DNA, 62 bp, Unknown
  Description of Unknown: RightRegion for integrase B10900 sequence
gaagatacccccgcaagccatgggaaaggcggtgtttatgatttccaggtggagttctatta

SEQ ID NO: 36900 - DNA, 260 bp, Unknown
  Description of Unknown: RightRegion for integrase B10901 sequence
tctaaggctggcgtgcgggtgacgtttcgggagcgggacctacgatcacggtttcgggcgtgaacgggaaaccgggccaggccgcgtcgaatgcgtgcccggccgggcagtgctggcgggccgtgtcgcggccctcggcccacttgccggtgacctcgagcccgcagcgggggcagtcgatggcggcctcgcgctcgatcggggccgaggggtcctcgagcgatacgaacgccgacacgtagcggctcacgcctggagac

SEQ ID NO: 36901 - DNA, 260 bp, Unknown
  Description of Unknown: RightRegion for integrase B10902 sequence
caaagcctcatatcccgcattgtcctgaccgacgaccaagttgatattgagtgggcgttttagcacaaaagaaaaagccctcctgcacaggaacaatcctgcacgggagggcttttggcttacttggtttcggcgttcagctgagatactgcgatagtggcggcggtggcagccgcagtgctggcagccacttcggtggcgccgctggtagcggacgggagcgcaatcttctgacggcgcacctcggcttcaattttagt

SEQ ID NO: 36902 - DNA, 260 bp, Unknown
  Description of Unknown: RightRegion for integrase B10903 sequence
gggatgcggcggtttaccgcttaccccaaagatgaatatgacgcattcaaaagagaggactgatttatatggcaagagaaatcgtacacattcctgcacggcgtggcctgagcaatcgagctactgtgacagaccgaaaaatccgggtggctgcttattgccgagtttccaccgaccatgaagagcagatcaacagctttgaaaaccaggtgacctactacaccgaatacatcaatcggaatccgaactacgaattggct

SEQ ID NO: 36903 - DNA, 62 bp, Unknown; identical to SEQ ID NO: 36490
  Description of Unknown: RightRegion for integrase B10904 sequence

SEQ ID NO: 36904 - DNA, 62 bp, Unknown; identical to SEQ ID NO: 36491
  Description of Unknown: RightRegion for integrase B10905 sequence

SEQ ID NO: 36905 - DNA, 260 bp, Unknown
  Description of Unknown: RightRegion for integrase B10906 sequence
tcccaactgatcaaatacatatctgtaaacgctgattctatcagcatacactggaggttttaattttttttatatttttatctaacttttatcattcatttcaccggacgattatgacaaaattgtaaccggtgatctcggaaaagtcggacagcgcgtcctcttagaccttttacagacctccggtatcgaccttggggaacgccacatggactgcggcattgaaatttacgactgcaaaaagcaggacacgcacgcgg

SEQ ID NO: 36906 - DNA, 260 bp, Unknown; identical to SEQ ID NO: 36576
  Description of Unknown: RightRegion for integrase B10907 sequence

SEQ ID NO: 36907 - DNA, 260 bp, Unknown
  Description of Unknown: RightRegion for integrase B10908 sequence
tttatagcatatattatatatgaccgcttgaatgataatataacgctttttttaaacccttaattacaaacatttacaaaaaggcggggcgtgttgaaaatgtttgcaataaaaaaggggctaccgtaaagatagccccaattgcttattttgtcttaagtatgccaccgagttttttgatgaaattctcgcctgctactccattctgcttgtacccccactttttaaggcactcgtttacggctttttctgtgccgtta

SEQ ID NO: 36908 - DNA, 102 bp, Unknown
  Description of Unknown: RightRegion for integrase B10909 sequence
attgaccatatcgagcaggatccggataatccctgcgacaactggattgttttttttaagtaattcgacttactaaccacatacctccatgagttattatta

SEQ ID NO: 36909 - DNA, 260 bp, Unknown
  Description of Unknown: RightRegion for integrase B10910 sequence
gaaagcctcgtgtcccgcattattctagacaacgacaatgttacaatcgaatgggctttctgacgacgcaaaaaaaatccgcaacgggatagctgtcccgttgcggattttcatgcgcctttccgaacagataactctcaactctccctgtccttgatgatgtccctgaacaccatcaccgccacaccgattactatgccgtttatcaatatctccacgacttgcttcgtgaaaccaaacagcataaaagtcggcagagc

SEQ ID NO: 36910 - DNA, 260 bp, Unknown
  Description of Unknown: RightRegion for integrase B10911 sequence
cattcacccaaaagggttgtactagacacgacattttcctgcggaaaaatcgaagtagaataaagcccctccagtcgaaaccgaaagggctagcgaaaaagccactctactttatacattcgcggttatagagtggccttttcggggagacaggactatcatcctgaatacgccaccatgatataatggattgtaggtacaaacaatgaaacgttgccatcgacaagagttcttttggactattataagctatatgttat

SEQ ID NO: 36911 - DNA, 62 bp, Unknown
  Description of Unknown: RightRegion for integrase B10912 sequence
cagtctctaatttactatatcgaaattgacaacgatgatgtgatgatccactggaagttcta

SEQ ID NO: 36912 - DNA, 260 bp, Unknown
  Description of Unknown: RightRegion for integrase B10913 sequence
actttgatcgaggcgatcattatcgacggcgaggatattacaattaaatggagattttcgtaaggctaataattacctccacgttgaccgaggtatttattagcctgtacgcttttaagcgtacaaaatgcacaaaaaccggcctaaaactttgtacagtactccgtcttgtaactatacgcttataagcgtatactataatcaagataaagataacaaacatacaaacggaggatataaaccatgtttaagactaacga

SEQ ID NO: 36913 - DNA, 260 bp, Unknown
  Description of Unknown: RightRegion for integrase B10914 sequence
gcattgattcacaagatagtgatagatggggaagatatcgagatttactggacttttgggtgatttttttctttttcgcaaattttagccttgattttattcgtggctacaatttgcaaaatgtgatataattcaagtgttgtctttttgtttcgtgagttttccatagaacgaaatcctttctctgaaagagccacccggaatggatggctcttttactttatcgcatatccttgcggattaactctttgatgtagcct

SEQ ID NO: 36914 - DNA, 260 bp, Unknown
  Description of Unknown: RightRegion for integrase B10915 sequence
gtacgtccgtcggcgaagggcccgcggttcgacgagaagtcggtcgacgtcgaagacgcgtaaggccgcctgcggtgcgggatttgggcaccggcggcggcctgggaagtggcaagcagcgaaggggatgttaggtggcgaccctcgccgagctgcggcgccgagcgcggcaacaggccttgatgtagacctggttggcgtactcgcgcgccgcgggattgtcgacgatgaccgtgctgtcgatgacgcagtactcttcg

SEQ ID NO: 36915 - DNA, 260 bp, Unknown
  Description of Unknown: RightRegion for integrase B10916 sequence
gctgcggtcaagactatcacggtaaattcggacggtacgctcgtgttcacctgggatgcttgatgttatcactttatagggaaacgcttcagtgtttccacttcaagtgagaacaaagaccctcaccgaagtgggtccttatcgacatggcataaactgatgacgcaaattcaagttgaaggaaatgggtgtttactatcgaatatctttacttgtccaattttgtgaaaacgatatgaggtgcgtaaatgtcaaacatt

SEQ ID NO: 36916 - DNA, 260 bp, Unknown
  Description of Unknown: RightRegion for integrase B10917 sequence
tttattgatagaatagtattttgtggaaatagagattatgatttcatagtctatttaaaataaatgctgggcttactaacatactatctcctttcggcaagtgtgatttagtaagccaaaaaaaagaagtcagatattactctgacttttgttatatattataatttttgttaaatttttcaaataaaaaaatattatcttactcttattttttgacctgcatatatcaaattaggatttttaatattattccaagcaac

SEQ ID NO: 36917 - DNA, 260 bp, Unknown
  Description of Unknown: RightRegion for integrase B10918 sequence
gctctgatccggaggatagaattaaatggtgatgatgttaccatttattggaatttcaaatgatcatactgggaaataggttacaacgcatttcccactgtgagcaaaagaggcagaatgtttattcctgcctcttttctttgaacaactcaaaccatgcatctaatctgccggaaatatcatcaatcacttcctcaggatagcaagcaccctcatccactgctttctctgccagatcggaaagagcctgcttcaggtac

SEQ ID NO: 36918 - DNA, 260 bp, Unknown
  Description of Unknown: RightRegion for integrase B10919 sequence
gatcacgtcgaggtgttccccggacatccgcgcgctcgcattgtggtgcacccacgcgaataggtggcaacaggtagcagtcaccctcatgaatagtgtctaatgtcaccatgtcgaagaccacagtacgcacagcacgtgagccagtgcaggacgaactcaagcggctcgacactcctgtcgggttcagagatgcagtcgcggcgctgcgcatggtccgtctcgacgtcgacgagcgagccgccatgcgtgaggtatcg

SEQ ID NO: 36919 - DNA, 260 bp, Unknown
  Description of Unknown: RightRegion for integrase B10920 sequence
gacaggatcgaagtagactggatgggcaaggaaaaggaaataaagagggttacttttttttaaccttttgtttgtactaactcaccattacggttccgcaaggtatcgttagtacaataaaaagaaacccctggggcagcaagctccaggggtttcttgactttttacttgagatatgctttggaacagtacccggttttgccgtccgctacgccgtacagccagacggaggagccgtttaggttgtaatagccatagca

SEQ ID NO: 36920 - DNA, 260 bp, Unknown
  Description of Unknown: RightRegion for integrase B10921 sequence
cagctaatcgacggagtgtatatcaacgctgagggagagctgcgcattgagtggtcgctgtagcgggggattatattactgaaaattatcatatatgacaataatacaacaaagcgtacacctgttccatggtatatcttggagcgaaaaaacgaaaaaacagccacgggacggcatcctgtggctgtttgacattttattctattgacatttttgtgactattctgtgtcagaattttgacaggttacagaccgagttc

SEQ ID NO: 36921 - DNA, 260 bp, Unknown
  Description of Unknown: RightRegion for integrase B10922 sequence
gagtccctgatcgatcgtatcgagctggatggccgatccataaccatccgctggaaattttgatcatatgcaaatggtctatcccattacaatggcatattccatttgctaaaacagagagggcgggatctctcccgccctctttttacagcctgtcgctcaccgtggggttgttgacgatgccgaagatcgccagcagctcgccgatgatggcgatgatcttctccaccagatcgctggtgagtccccatttttccagc

SEQ ID NO: 36922 - DNA, 132 bp, Unknown
  Description of Unknown: RightRegion for integrase B10923 sequence
tctgtcattaaagaaattagaattgataatgaccagaatatcacgggtgttgtttttgggtagtgttgtactaatgtgacactacccgtgggttcatcagccaggatcagggatggatttcctgccagcgcc

SEQ ID NO: 36923 - DNA, 260 bp, Unknown; identical to SEQ ID NO: 36471
  Description of Unknown: RightRegion for integrase B10924 sequence

SEQ ID NO: 36924 - DNA, 260 bp, Unknown
  Description of Unknown: RightRegion for integrase B10925 sequence
cggtctgtaatccaagaaatccgcatcgaccgggagcgcaacattgccattaattttttgtaaaaaacatgggtactaactattcgcatcctaaccgatacatatagttagtacccacgcatacaatcatccgttcgattcaatcagcttgtatcgtttgtccggtctctgaatctcctcaagtttcttcatcgcgatagttctcatcgcggtcctgaacacaactctttcgttgtcggacgtatcaataatccgataca

SEQ ID NO: 36925 - DNA, 260 bp, Unknown
  Description of Unknown: RightRegion for integrase B10926 sequence
tttcagctggtggacagcatacatatcaatggcggggatgtgcgcattgagtggtcgttgtaaggaggataggtattaataattttggtacaattcgattttatcacacaaaagcacatatgttcgatggtaattgtcggtaaaataagaaaaaacacacgatttcgtgtgtttttctttacgttcgcaggatttttatttatcaagtccgagctcacggattttcttttgtacaaagtctgcaaaggcgatattggcga

SEQ ID NO: 36926 - DNA, 166 bp, Unknown
  Description of Unknown: RightRegion for integrase B10927 sequence
aagtccttcgtgcagtcaatcactgttcacgaggacggagaaatggatattgtttttttatgatcttgtttctactaactacgcaccgcccgtcggctcatctgcaaatataatttccggacgattcaccagtgctcttgcaattgctactctctgctgctgtcct

SEQ ID NO: 36927 - DNA, 157 bp, Unknown
  Description of Unknown: RightRegion for integrase B10928 sequence
aagtccttcgtgcagtcaatcactgttcacgaggacggagaaatggatattgtttttttatgatcttgtttctactaactacgcacctcctgtcggctcatccgcaaatataatttccggacgattcaccagtgctcttgcaattgctactctctgc

SEQ ID NO: 36928 - DNA, 260 bp, Unknown
  Description of Unknown: RightRegion for integrase B10929 sequence
tggggcggcgttggagtgacagtccggcccattcgggcgggccgcatagaccgtgcggtctgattacttgtgactcaagatctttcgaataggcggggtaacgttccggcaaaccagtgggtcgtccattcctaaaccatgcggttggaactatgatccacgtcacgtgacatggcacgtgacccggtatcccggggttgaggtgaggtcggggtagtactgagaggggcagacgaaatgcctgaacaaggggattcgtc

SEQ ID NO: 36929 - DNA, 96 bp, Unknown
  Description of Unknown: RightRegion for integrase B10930 sequence
atagaaaaaagaaaagtattgaataaaagtgaaataaatatagttaatgttatttttaaataaaaagataatactcttatacgttagttttaactt

SEQ ID NO: 36930 - DNA, 260 bp, Unknown
  Description of Unknown: RightRegion for integrase B10931 sequence
caggacacaattgagctacagttgctttatgtgccagcgaatctcaaagagaaaaacgtgtaaaagcaatgttgtagccatctccccaagtgcttttgcacgttatcttgtcctgactatcccaaggccagatagacccgcatcaccattgggcaggcaggcatggggttggcacatcaggcaagtgcggcgaatccgcggaattgacccacggcaagcagccaaagagatcggcatcgcaagacagacgctctatgggt

SEQ ID NO: 36931 - DNA, 260 bp, Unknown
  Description of Unknown: RightRegion for integrase B10932 sequence
cttatcaaaaatatcatagttgacggcagcagaatcacagtaaatttacggctcaaaaaataattcaacttaaaaaaagaggcttttttataacaaaaacctcttttttttcttgacaaatatatttaacggctctaaaatagaggtgaagctcagaaaaattgaatagtccattggcgcaataatgaagtaacgctataaatattaacttcaatagggcgataaaatattatatcggaaacataagctcaatatcgaaa

SEQ ID NO: 36932 - DNA, 260 bp, Unknown; identical to SEQ ID NO: 35603
  Description of Unknown: RightRegion for integrase B10933 sequence

SEQ ID NO: 36933 - DNA, 93 bp, Unknown
  Description of Unknown: RightRegion for integrase B10934 sequence
gtaaaaaaagtgaacatatacgataagcatacaatcaacatagttgatattatttttaggtaaaaaaatacattctcttatacgttagtatta

SEQ ID NO: 36934 - DNA, 260 bp, Unknown
  Description of Unknown: RightRegion for integrase B10935 sequence
gccctgatcggcgagttcgcccggagaggcatcggcgcggaactggtggaggtggaggcctgatgaacgacacactggaaaccttcgtgccactgacattccgccgccggggcgcgcggcgcgtggccgccgacgaccgccatgttcacgatgtgacgttgctggagggggtggcacgcggtttctactggcagcacctcgtggacaccggcgagatgaagagtggctcggagatcgcccgggccgaaggcttacaccca

SEQ ID NO: 36935 - DNA, 260 bp, Unknown
  Description of Unknown: RightRegion for integrase B10936 sequence
atgcccgttcgttcgggtaagcgtatcgaccctgcgcgcctgaaaatcaagtggagattttagctgtcttttagaattcgcggttgcgccatgggttatgaagggatgcttttgcggcaggggaaccggaaaatccgtacaaaaaaaagaggccccccacgtggaggggcctcaaacatccgctctggcaatcactcaggcacaacggtcgtcttaccgtctatccactcgaccagtttgctgtcgcgccaatacgcctg

SEQ ID NO: 36936 - DNA, 88 bp, Unknown
  Description of Unknown: RightRegion for integrase B10937 sequence
agagagctgatcgacaaggtgcaagtcacatctgacaagatagttattaactggaagatttgagaaatttacttacgttcatttcaat

SEQ ID NO: 36937 - DNA, 260 bp, Unknown; identical to SEQ ID NO: 36533
  Description of Unknown: RightRegion for integrase B10938 sequence

SEQ ID NO: 36938 - DNA, 260 bp, Unknown
  Description of Unknown: RightRegion for integrase B10939 sequence
cgttccattgtcaaggaaatccgtgttgaccatgacaaaaacattcatattatttttttatgattgttatactactaactgaacccctccggtcggtaggttcaatttagtagtatgaaaatctctgttattttttacgtattttacgtatatttttattgacattacgtaaaatacgtgttattatatacttgtaaggaggaaacaatacaaatgagatttcgagaaattgaaaaaatagtcctcaatgacggatggga

SEQ ID NO: 36939 - DNA, 62 bp, Unknown
  Description of Unknown: RightRegion for integrase B10940 sequence
cgttccattgtcaaggaaatccgtgttgaccatgacaaaaacattcatattatttttttatg

SEQ ID NO: 36940 - DNA, 260 bp, Unknown
  Description of Unknown: RightRegion for integrase B10941 sequence
ttcgatatcatccgacgtatagatatcgatggtgaagatgttaccatccagtgggatttctaatcaagtttgaaccctatatcgttttgtttcttaacaaatactatttcagaccctttgtaacaattcgttttagcatattgttattaagacattaaaaaaagacccctgagcgtaatgcccaggggtttaaccaaaataaagcacaaagttaaggctttttataacgtattaaacatactgaatcactatgtttatat

SEQ ID NO: 36941 - DNA, 213 bp, Unknown
  Description of Unknown: RightRegion for integrase B10942 sequence
tgcataagcaagattagcatagaccccgaaacaaaaaagtttacgttttatttttttgcataaagctgtatgaagtttgcgtttagttgtctaatctttctgacacttgtgttcgctcctgctcatacttggaaaccatttcttggtacaattcaacggggatagtgccaagagcataatcctcatacatccggctgattatagtgtacaatt

SEQ ID NO: 36942 - DNA, 260 bp, Unknown
  Description of Unknown: RightRegion for integrase B10943 sequence
tccttcgtggacaccatacgcattcgtgaagacggcagcatcgccgacattatttttttatgataatgatgcacctaattcagcgttgcccgaaggtgacgccgaattaggtacatcttttttcttattccgggatgaactccacgtcgcccggcctgccgctgacgaagtatccgtccgctgtctggtacaggacgccgtccggcgtggtgaacttcttcacagccttcttcatatcgaaggccgtcacgccgcagatc

SEQ ID NO: 36943 - DNA, 260 bp, Unknown
  Description of Unknown: RightRegion for integrase B10944 sequence
tcagcggtggtatcaggtcgcgccgcgtccggtaaccgccgaatcgtgacggtgtggcggtaggtcgtgtcacaaccgtaccgaaatgggtacggttcagccctccgaataaacggaactatgacggacatcctcaaacgcgcccctatctcattagagtgcatgtttatttataaaactgtacaagcaatagagatagggactcagaatctgatgtccgtcatattgccgcttattcactgctcctagatcgtctgggc

SEQ ID NO: 36944 - DNA, 260 bp, Unknown; identical to SEQ ID NO: 36115
  Description of Unknown: RightRegion for integrase B10945 sequence

SEQ ID NO: 36945 - DNA, 260 bp, Unknown
  Description of Unknown: RightRegion for integrase B10946 sequence
gttgtaatatacagagaaaaagggaagttcaagaagattacacttgactatactttaaaatgaccccaacctgtgtaagagttaacttcgcgcatgcaaacttaacttttatacaggttagggacgatgtattattttcaacgataatactttaaataaaataaaacatcaaggcggagctttcactccgccgcttctccttcccacatctcttcgagtgcctcctcaacaaactcacacactgccaacactccttcgat

SEQ ID NO: 36946 - DNA, 260 bp, Unknown
  Description of Unknown: RightRegion for integrase B10947 sequence
ccgacgcaggcgggcatcccgcgcgacgccagcgcgctcacgttcgagccgttcgtcgagtaaccgccgggctgcccgcgccaagatgcggtcaacttccgcggccacgcgcggcggcagcggaagtggaaccagtccatgggagtcctcgtcgttgagcacgggcgggtcgtctttggccgcaggtgacatgtctgtcagtatctggcgggccagacctgccgtcgatgccaacgtcaggacacacaagctgactgtct

SEQ ID NO: 36947 - DNA, 260 bp, Unknown
  Description of Unknown: RightRegion for integrase B10948 sequence
tccttcgtggacaccatacgcattcgtgaagacggcagcatcgccgacattatttttttatgataatgatgcacctaattcagcgttgcccgaaggtgacgccgaattaggtacatcgtttttttattccggaatgaactccacgtcgcccggcctgccgctgacgaagtatccgtccgctgtctggtacaggacgccgtccggcgtggtgaacttcttcacagccttcttcgtatcgaaggccgtcacgccgcagatcg

SEQ ID NO: 36948 - DNA, 260 bp, Unknown
  Description of Unknown: RightRegion for integrase B10949 sequence
cccggtcgcaagggactcgatccggcccgggtcatcttcgagaaggggttggccggatcgtgacaagacaccatctatccccgttggtagtgcttgtatgacaccccatggaacagcgggacgatcttctagaccagatacgggaacgactcggggacaacgccgatcggtatgacctcggcgggatcgtgcaggcgatcctggacaggtacggggacgtcgccacattggattacatcgatccggacacgcttcatgcg

SEQ ID NO: 36949 - DNA, 260 bp, Unknown
  Description of Unknown: RightRegion for integrase B10950 sequence
ccggcgttgaagggccggaaccggttcgacccgtctcggatcgaggtggtgtggcgggtctaaccctccggcgccgctgactgctggtcggcgaggaacttggcgagttcggcctcgacgtcgaccgagtcggggtcgaactcgaaggtgccccgcggcccccgcacgatgatcgtggtgccgtcgtcgcctctcccgatcaggacggcgtcgtcgccctcggtggtgagcgcctcggtgaccttctccagcgtgagttc

SEQ ID NO: 36950 - DNA, 62 bp, Unknown
  Description of Unknown: RightRegion for integrase B10951 sequence
gaaaagattgaattcacgaaaaaagatcaaaatccccacattcttaatgtctctttttatta

SEQ ID NO: 36951 - DNA, 59 bp, Unknown
  Description of Unknown: RightRegion for integrase B10952 sequence
ttggagcagttccttatctctcccaatgaacgtaccgaggattataaccgcaggatcat

SEQ ID NO: 36952 - DNA, 260 bp, Unknown
  Description of Unknown: RightRegion for integrase B10953 sequence
accgcacttgttgaccgtatagaaataggccgtgatggtataacgatatattggaatttttagtttccattaagcgtctgtcgttttaatgactatttcttaacggaaacagtaacaaaattgttacattcaaccgcaaataaaggtaacattaagcaaataaaaagcagtgtggttaaatcagtttaataaattgttacatcgagccataaataagggtaacaattaagcaaataaaaaagcagggcggttaaccctgc

SEQ ID NO: 36953 - DNA, 260 bp, Unknown
  Description of Unknown: RightRegion for integrase B10954 sequence
tcaatctgcatcgataaaatcatgatcaccaacggcgaaatagagatgttctataacatctaaagcatattcagcacccaatttcaactacttcaagctatcccgatagacataagtagttgaaatccataaaccaaaaggagagaaacctatgtctattaacgcatcgtcggcattttcagtcgccatcgaatctgtcaggatgcggacagatttgaccgaaaaacagaaagaagagatcacatccctgctacataatg

SEQ ID NO: 36954 - DNA, 260 bp, Unknown
  Description of Unknown: RightRegion for integrase B10955 sequence
accttgatcgacgaattcgcgccgcacaacatcggcgctgagatgctggaggtcgaagcctgatggacaagtccttggaaactttcgtgccgttggtgttccgccgccgtggtgtccagcgcgtggccaccgacgaccgaaacgtccacgacgtcactctgctcgacgggctggcgcgcgccttctactggcagcaattgctggacaccggcgcgatgacgagtggatcggccatcgcgagggccgagaaattgcaccat

SEQ ID NO: 36955 - DNA, 260 bp, Unknown
  Description of Unknown: RightRegion for integrase B10956 sequence
ttcgaccttatccggcgcatcgacatcgatggtgatgatgtctccatctactggaacctttaatccaatttgaaacctattctgttgcaaaacactactcttttaatctctttgtcactatttgctttagcatagtgttactaaaggaaaaaaataaagcccccgggtatttctcccgagggctcatttttatgatcaaatctaacactttttacgataacttatacgatgaagaccttgctcatgtccctttcgaactg

SEQ ID NO: 36956 - DNA, 260 bp, Unknown
  Description of Unknown: RightRegion for integrase B10957 sequence
agtattattaaagaaatacatgtgaatgataaaaaagaaatcaccaatattattttttggtaatttcaatttagtaaataatattctcctgtaggtgcttattaattactaaataaaaagcacttgccattacagcaaatgctcaatctacattgaattaaaatgttttcacaaattcagcgtttccattatgatatttaagttgttttttcatgaagttatttaactttctttccgtgaaatcttattcatgccatgtt

SEQ ID NO: 36957 - DNA, 260 bp, Unknown
  Description of Unknown: RightRegion for integrase B10958 sequence
tcattgattaaccgtatagagatagacggagaaaacgtttatatctattggaactttgattagtgcatagacaaattgtcacttcaatgactattttataaggcaaataaaaaaaagacccccaaggaataaccaagggggtcaaagtgaggggaaaatgtatcgcaagcgatcaaatcgctgaacgaccttcgtttatgccgaatgcaacatagtgataataatacatcgggttatcgtccccgaatgcgttctgcaag

SEQ ID NO: 36958 - DNA, 260 bp, Unknown
  Description of Unknown: RightRegion for integrase B10959 sequence
tctatcgtggattatatagaagtggataaagacttgaattttatcccgcatttttttaactaaatatttttacctttaaggacacgccggacggagagtgcctaaaggtaaaaaacaaaaggaggcccgcaaacatggacacagcgcgaaaaattgaactattgattgatctttatatcaatggagagattgacaaggaagattatatcacgcttagaaaaagcattgaaggcggaaaaaattgtaagcaaaaggccggg

SEQ ID NO: 36959 - DNA, 136 bp, Unknown
  Description of Unknown: RightRegion for integrase B10960 sequence
tcggggcagaacacggctactatctcgtgttcggatattgcgtgttccgctccaccattttaatcgctggtcgaaccccaggcggcgagattatcgtcttgccttacggtttcgcgctggcggccaagttagagag

SEQ ID NO: 36960 - DNA, 260 bp, Unknown
  Description of Unknown: RightRegion for integrase B10961 sequence
gcctttcacacagccaaggtcttggcagagagaatgggtatgatcgaaatgcaggagaaataaaaaaagcccctcccttcggaggggttttgattcagaatacatcaggcatctacctcattgacaagcgcaatctcccgttcatagcaaccctgaaggaacgttgaccgtttcaccttgtacacatatcctttctgcgatatgatcgtcttgtctttgtcgatatacccagcgtttgccgtactcatgtacgttgtgga

SEQ ID NO: 36961 - DNA, 260 bp, Unknown
  Description of Unknown: RightRegion for integrase B10962 sequence
cgagtcaacattactccggggcgccctcgctcaaaggtccaggtaattatgcggagcctttgaggacagtcacgctcatgaccgactattgaggctccataggtaccgtgctttgtgaaaaagggtgacgacggaccgattgtggacacgttcaaatagcccaatgttctgcctctcctgtggctcagctctagacaagtaccggtggtgcggacactgcgaggcgttcgcggatgcgccagggtacgacaaaaagcccg

SEQ ID NO: 36962 - DNA, 260 bp, Unknown
  Description of Unknown: RightRegion for integrase B10963 sequence
tctatcatatcctccatcgaggttgagggagttacgataaagaaaatcaacttccgcgcatagcgcgtttttcttaggcgcatatggtggactaactacagtatcactaccgaaatggtgagttagtccaccattttcataataaaaagagggagggacataaatgtccttccctctctcttgttttagctcataactttccagatagcctgcttctgtgcatagctcaatccgtactcatccatcttgcggaagaactc

SEQ ID NO: 36963 - DNA, 62 bp, Unknown
  Description of Unknown: RightRegion for integrase B10964 sequence
caaatcattaaagcgatctatgttacaaaagatcgtaacgtggattatgtagattttttata

SEQ ID NO: 36964 - DNA, 260 bp, Unknown
  Description of Unknown: RightRegion for integrase B10965 sequence
attaaagatagaaatcaaacttattttacagaaagtcgtattaaaactattatttataactaaaattataaattaattattatataattgtaaattttatattaattattatataattgttataatttatatagaaattaataaaaattgttataatttaaacccttaaatgtataaaacggtttattatttttttctcaaattcgacttcatcactaataaattttttatattttgaccaatatatattataattgtta

SEQ ID NO: 36965 - DNA, 260 bp, Unknown
  Description of Unknown: RightRegion for integrase B10966 sequence
caccggccggagcgccgaggggacccggtgacgctcagcatccatggcacctgggagcagtagcccctccctaccgccgtgcggtgttgttgctggacgaggctgcagcacagtaggaactggtggatcctgtcggacccccgccctatcgtccgttccatgcccgacctcaccgccgacgagttcgccgtcctggacttcgaggaccagtggtggcggtcaccaggccgcaaggaagcggcaatccgggagcggttcgg

SEQ ID NO: 36966 - DNA, 260 bp, Unknown
  Description of Unknown: RightRegion for integrase B10967 sequence
agtatttcagaagtcggacaaattatcgtgattttcctagaaggaactgaagtagaattataagagactgtgactgagaggatgcagtctttttgtggttttagtggtataattacttaaggagtataaagcatgggtgaaaatttgaattctaatatagatcctcgaattatatttaaacaattacctccagctacaataatcaaaggttttgtagctggtgaggccaaatgtaattatgaaatttatctattggaatt

SEQ ID NO: 36967 - DNA, 260 bp, Unknown
  Description of Unknown: RightRegion for integrase B10968 sequence
ggtaatcgacggacgtttgatccaaacctgatcgacgtcgattggcataaaccgtttcggtaagtaagtaaagctccctttgcaaacggacatttggcgctatagtgattcgaacgattgttcgaatatgactggctaggggtgcatcatgacaaataacgacgtcttctccgtcgaagtcccgcgcgtggatacgcttgtggaccaggcgaatcagctcgacgtatcggcgtcgtcgttacttgtctcggttctggcgc

SEQ ID NO: 36968 - DNA, 260 bp, Unknown; identical to SEQ ID NO: 36051
  Description of Unknown: RightRegion for integrase B10969 sequence

SEQ ID NO: 36969 - DNA, 260 bp, Unknown
  Description of Unknown: RightRegion for integrase B10970 sequence
acctctctcatagatcgtgttcttctctttgaagatcacatagaaatcgtttggaatctgtaatacatctattagcacaagacgctttcacggactaaaggatatagtaaccgcaatgctttaagccatgcgggtttttggatttttatagcatacgttataatgggttcatctgtattaaatagacgcatgataatggcgcgagtctgaatttctcaaaacccgcgccattattccgtttgaccgttttattaaaccgt

SEQ ID NO: 36970 - DNA, 260 bp, Unknown
  Description of Unknown: RightRegion for integrase B10971 sequence
tccgtggcagtgcaggacgatcagatcacagagatccattttatcggtgacgtttgtgattgattgctttgccacctgacgaggcattttatcacaaataaaaattgaggccggattgctccgacctcttttataagttatagcttattttgttctgcattgtactgagcagtgctgatccccaagagcgcacccaacagcacgcagatcacgctgcaggtcttggccacctcatcggccagaggccactgccagatggc

SEQ ID NO: 36971 - DNA, 260 bp, Unknown
  Description of Unknown: RightRegion for integrase B10972 sequence
agaaatttaattaaggaaattcatatcattgatggtaggtatgtttttgatattaaattttagtgcttaacttatcatcaccagtaggttacgcttaattaggcactattttaaaaataaaaaaaagactaggtggcgttcctagtctatttataaagagagaaaaaagagtgcgtgtacacaattatattatctacaaaataatattttatatacaaaaaatgaggtgggattattttcccacctttttaatcttttca

SEQ ID NO: 36972 - DNA, 260 bp, Unknown
  Description of Unknown: RightRegion for integrase B10973 sequence
aagctaatcggtgaattcgcaccaagagagatcggcgcggaactgatggaggtcgaggcctgatgaacagctcgctggaaactttcgtgcccctgcacttcaagcggaagaagggaaagctgctggtcgacgggagggaatctgcccacgacgtccggataattgaggccgttgcccgggccatgtactggcacgacctgctcgactccggtacgttcaagagcgtggtcgagatcgcccgtgcggaaggattgatgcca

SEQ ID NO: 36973 - DNA, 260 bp, Unknown
  Description of Unknown: RightRegion for integrase B10974 sequence
gttttactcgaggtacgagtggcggcaggtggcggcgctgtagccgtgcctcgtaccgtttgaccattatcagtagagcttctcttgcggtcagaggctgggaagggtgatccatgggaggcgcaagctgtggcaagcagcatacacccctggggcgtgcgggatacagattaggcgccccttaaagaaatgttcagtgttaacgcccgttgacacccctgagcgattggcggattagtcgacgatttaataatttagcc

SEQ ID NO: 36974 - DNA, 260 bp, Unknown
  Description of Unknown: RightRegion for integrase B10975 sequence
gttgccataaacaaacagcaagatttaccccctatggggtataatacaggggaaaagcgttaaaattgacacttttcgggtataaaaaatgccctccccgaagggagggtttttgtgtttttggggaatttcagcaaatagtttttcggaatattaccaaacagttttgacgaaccgcctgtcccttagtccacccaagaggacggtctgcggctgttcggggtcttgcgcctgatgcgggagaagcatcttcctcagag

SEQ ID NO: 36975 - DNA, 260 bp, Unknown
  Description of Unknown: RightRegion for integrase B10976 sequence
acccccggccgcgggcctgggcggatcagcgtcgagccccgcggcacgctcctcggcgagtagccggcgggcctcgcggtcgagcaccgcctgagcctcggcgcgcgcgtcgtcgtcgaggcgccagcgaaccgggctcacagcggcgtcaccttgaccgtctcgcgcacttcgacctcgacgcgcacaggcttccacgatcgcttcggcaccgcggcgtagacggccgtctcgttgctcacggtggcggcgtacttgcg

SEQ ID NO: 36976 - DNA, 260 bp, Unknown
  Description of Unknown: RightRegion for integrase B10977 sequence
ggtaagggcgtgaggttctcccccgaacaagtgcgcattgagccgaaaggaaaccagccatgagccgcaagagcaagggcctccaagtggacaacctggacggaatggtggtcctccagtgccccaacggacacacggtggcaaccgtccgaaagtcgcttggccgttaccacatgacggccggggactttgagggtgaaaaccccctggaccacccactggcggtcacttgccgctcctgtgtggccgcgggtcgccgt

SEQ ID NO: 36977 - DNA, 260 bp, Unknown
  Description of Unknown: RightRegion for integrase B10978 sequence
gccctgatcggtgaattcgccccgagagggatcggcgcagaactggtggaggtcgaggcctgatggacgacacactggaaaccttcgtgccactgacgtttcgccgccggggcgcgcggcgcgtggccgccgacgaccgccacgttcacgatgtgacgctgctggagggggtggcacgcggtttctactggcagcacctcgtggacaccggtgtaatgaagagtggatcagacattgcccgggccgaaggactgcacccc

SEQ ID NO: 36978 - DNA, 260 bp, Unknown
  Description of Unknown: RightRegion for integrase B10979 sequence
agagccctcattgaccacatagagattgatggtgaggacatccacattcattggaacttttgaattattagcccattcacatggtcatttcaatgactctgtgtttaggcaataaaatagaggcaggagagaaacctgcctcttttcctatctgtcattgatgatgtcatacacatcacagtccagagcctctgccaattgcaacactgtgatgacctgtgccttgttgatgtccctgttgccctgctcaaacatttgga

SEQ ID NO: 36979 - DNA, 260 bp, Unknown
  Description of Unknown: RightRegion for integrase B10980 sequence
ctcatcaaagagttcgcagcgaagggcattggtgcggaactggtggaaatggagcccgcatgaacgctgacctcgaatcctttgtgcccctcacttattcccgacgcggcgtacagcggctggccaccaccagtgccgtggcgcacgacacgacgtttttggtggggctgagtcgtgcgttttattggaagagcctgctcgacaccggtgtcatgaaaagtggctccgagatcgccaagaatgaagaccttcaccactca

SEQ ID NO: 36980 - DNA, 260 bp, Unknown
  Description of Unknown: RightRegion for integrase B10981 sequence
gccttgatcggcgagttcgcgcccaggagcatcggcgccgagctgctggaggtcgaggcatgaaggacgggacgctcgagaccttcgtgccgctgaccctgcggcggcgcggcgtgcgccggctggttcagcaccaggccgaggaccgggacgcgcacgacagcacgctcatcgaagggatggcacgggccttccactggcaacggctgctggacagcggcgcgatgcccagcggctcggccatcgcgcgcgccgaaggg

SEQ ID NO: 36981 - DNA, 260 bp, Unknown
  Description of Unknown: RightRegion for integrase B10982 sequence
agccttataaaaaagattgtgctaaatggcgatgccgttgaaatatactggcgctttgagtaaagccaaatattataccataaagtgtgttaaaagtaattgccatgattttgccgtggttttgccatgaaattgcaaggcaagtaatgcaaatagtaattacttttgtatacttaggtatatacttacgtatatttgaaatgaattatacttttaaggccacaaaagtgtaattcattttatttttcagtgtattgtag

SEQ ID NO: 36982 - DNA, 87 bp, Unknown
  Description of Unknown: RightRegion for integrase B10983 sequence
ataaaatatgtaaaacttaaaaataggcattctattaaaataagcgatatagaattttattaacttatgtacggaagtatagacact

SEQ ID NO: 36983 - DNA, 86 bp, Unknown
  Description of Unknown: RightRegion for integrase B10984 sequence
atagagtatgtaaagcttaagaacagacattccattgaaataaaagatatagaattttattgatataagtacggaagtatagacac

SEQ ID NO: 36984 - DNA, 95 bp, Unknown
  Description of Unknown: RightRegion for integrase B10985 sequence
atagagtatgtaaagcttaaaaacaggcactccattgaaataaatgatatagaattttattaatatatgtacggaagtatagacacctgattaat

SEQ ID NO: 36985 - DNA, 260 bp, Unknown
  Description of Unknown: RightRegion for integrase B10986 sequence
gatactttaatagatagaatcatagttaaagatgataatgtagatattcatttttctttttagtacacttaaacatctattaaaatagtagtttaagtcatacaaaaaacaaagacgcccctgtgaaaagggcgtcctctttacaaaacactattctgctttttaaaatacttcaacaaatacttggcgtccactacatcgtaattatcatctttatgatctggttcgccttctacgctatcttcatggaaatcatagtc

SEQ ID NO: 36986 - DNA, 260 bp, Unknown
  Description of Unknown: RightRegion for integrase B10987 sequence
accgcccttatcgacaagatatacatagacggcgacgacgtttcaattcattggaagtattgacgggttttccgtaaagctcatcttaatcaccttaacggaataaccttttcggacgattttagcgtcgctggaatgattaaggcacagtttaccgctcggacaataaaacacgctcaaatgggcgattttcgaccttaaacgggaagataatactctatccgagcaataaaaaagagggcggctttccgccgcccccg

SEQ ID NO: 36987 - DNA, 260 bp, Unknown
  Description of Unknown: RightRegion for integrase B10988 sequence
actataattgacaagataataattgtcaatggagatattgagatacaattaaagaatttttagcacatactacacaccatgccgatgataatgggcgagataaagaggtttttgcgggatgatgggatgattaaggtcagcaggacattgcgggaaaatggctggaagataaaaaaagcggcagaaaagataagctatgaaaaaggcagaaatgcaaagataagtgagattgctgctgcaacggagataacggaggagga

SEQ ID NO: 36988 - DNA, 260 bp, Unknown
  Description of Unknown: RightRegion for integrase B10989 sequence
aagtggcctcaactacgatctcttctggaggagtggggggaggatccacaaagcctggaataaggaacttgtagatcgtgtaatggcaggcctcgtaggtagcctgctcgtacggatcaagattccgcatttccattgcccagcggcgatcttcgtattcatcgtcccatccaccttcttcgtcttgcagctcaatgggctgtatgccgttgcgcatgaacatctcaatggctgtcaacgcgacgttcacccggtcctgc

SEQ ID NO: 36989 - DNA, 260 bp, Unknown
  Description of Unknown: RightRegion for integrase B10990 sequence
tccatgattgagtccatcacgctttttcccggccatgatttggagtttcattggaagttttaatttttacccacaatcggtgacgtggtttcaacctcgttattagttgtgggtatttttaaaatatttcttctatattatatacgtaagtatatcgcactgactacttacgtatattgcaataaaaaaagaggcaagccgaagcctgcctctttggaggggagtatatgagaaaagcaagaaaaccgaaaacctatcag

SEQ ID NO: 36990 - DNA, 260 bp, Unknown
  Description of Unknown: RightRegion for integrase B10991 sequence
cgggccatcataaaggaaatagagatagagggcctaaaggttacgggcgttaaatttttttgataattttcctggttttacatacctatatccacagaaatatatctgtaaaaccggaaaaagaaaagccgaaaaaaccgcgtaaaatcgccgttttcggcacatcttgacaaaattataaaaatgtgtacagcaaaaggagcccgcgggggctccttttcgtttagtcgataagccaggatgttgatacgctgatggta

SEQ ID NO: 36991 - DNA, 260 bp, Unknown
  Description of Unknown: RightRegion for integrase B10992 sequence
gagttgcatcacaaaaaactgcgcaccactgaaacggaattggaagcggaggccatggcatgagcgaacttcaaatccgagccaccggcaccacagaagtaatccagtccagcgacggccggatcacgctgtcggtaccgattcagatcaagcgccgcagcgggcgcaaacaaatgactctgcccaacgggcaatcagggcagccgggcaaactgttgcgaccttgggatgtggcggccacaccgctgcaactggcgctg

SEQ ID NO: 36992 - DNA, 260 bp, Unknown
  Description of Unknown: RightRegion for integrase B10993 sequence
gtgacgctccataccgtcaagggtgggagcaccaatccgtttatgcgaatcgaagtcgcataacgctcgcccccgaactacagactcccctacaaaaccccccgtgtggattttcccacgggggttttgctattctcgcccgaatggattacaagtaccgtcaactcatcgagagctacatacggattgcccagggcgaaaacgttacatacgaactagtccacgaactaagcgggctaaccctcgaagaagcccgagta

SEQ ID NO: 36993 - DNA, 260 bp, Unknown
  Description of Unknown: RightRegion for integrase B10994 sequence
ttaaggattattgataaaatttatattgagaacggcgaaattaaagaggttacttttttgtaacctcttttgatgtataatctcttgcatttctagtattttatcgttccaaaattaatcgttcgtttcaactggtgcttcaactgggcaacaataattaacgaacattacaattattccaattaaaacctgcttttacaccttctttataaatttcaatgaattttttcttaaaaaatactctttcgacaatatttaat

SEQ ID NO: 36994 - DNA, 62 bp, Unknown
  Description of Unknown: RightRegion for integrase B10995 sequence
ttaaggattattgataaaatttatattgagaacggcgaaattaaagaggttacttttttgta

SEQ ID NO: 36995 - DNA, 260 bp, Unknown; identical to SEQ ID NO: 36746
  Description of Unknown: RightRegion for integrase B10996 sequence

SEQ ID NO: 36996 - DNA, 260 bp, Unknown
  Description of Unknown: RightRegion for integrase B10997 sequence
acccgcaaaggggccaagttcaaccccgacgacatcgacgtccaatggaggatagacgcatgacgctgcgtcaacatgcttgacaacctgtgccatttcggcgctacagttgttagataagaaccccgcacctgagggcatcaggccggggcacggtccaactatctaggagttagacatgtcaaagattacccatgccgtcagggccgccgcaatcgcggtcgcctcgttggcgttgactctcacagtcgcggtcgcgg

SEQ ID NO: 36997 - DNA, 260 bp, Unknown; identical to SEQ ID NO: 36996
  Description of Unknown: RightRegion for integrase B10998 sequence

SEQ ID NO: 36998 - DNA, 260 bp, Unknown
  Description of Unknown: RightRegion for integrase B10999 sequence
tctagtataatagataatgttgaaatacttgattatgacaatataaaaataaacgtgtattaacttgaatagtcctgaagggctatgttagttgatacactcattaggagtgtgttaaaaaaatggaaataccaaagaaagtaagagaagaactagacaaaatatacgaagcttatgataaccaagcatatataattgattataaaggacaatacctaccaaagaaaagcgacgtattcacaataagacactatcatcat

SEQ ID NO: 36999 - DNA, 260 bp, Unknown
  Description of Unknown: RightRegion for integrase B11000 sequence
gacacccaggtcatcatgtcagacatttacattccagacgaaatactggaactgctcagttagtcatcttcccgaaccggcccttgcaaagacggcactgaccctgctccacatcctcacgtttcccattcgggttatagagggcgaggggcatcacttcgcggcagccgcacaaacgcagaccagcctcggttaactgctgctcagttaccggcattcttcaacacatcccatcccagattcgggttagcgtccttcca

SEQ ID NO: 37000 - DNA, 62 bp, Unknown
  Description of Unknown: RightRegion for integrase B11001 sequence
ttaaaaataattgataaaatttatattaaagaaggaaaaataaaagaagttacttttttgta

SEQ ID NO: 37001 - DNA, 260 bp, Unknown
  Description of Unknown: RightRegion for integrase B11002 sequence
aaactaaaaaggtatataagagttattaaggtttaccctgacaagattgacatagatttttaagttttcggtaaatagcctcacccatttgtcataaatgcaaactataaataaagcaggtatatgctagtagataattttgacaaagtgaaatatttgttatattatgggaaggaaattgcaaggaagttcacaaggcaatatataaatttagtaaggagcccccatgagacactaccccgaaaacagcacaaggctat

SEQ ID NO: 37002 - DNA, 260 bp, Unknown
  Description of Unknown: RightRegion for integrase B11003 sequence
tctatgattgaacgcatcacacttcttccggatcatgatttggaaatccagtggaagttttaaaatatacgtaagtagtttttgcagattacttacgtatataaaatttcacttgcttattacttgcctgtaacttgctatactaaagaaatcactgtttttctttaatacagtgattttatccacacttctgtggcatggtttcaaccttgttaatacattgtggataattttgtggagtttcttctatatataataaa

SEQ ID NO: 37003 - DNA, 260 bp, Unknown
  Description of Unknown: RightRegion for integrase B11004 sequence
tctttgattgataagattgagatagatggagaagatatcgctatctattgggcgtttgtttaattatgccgttcctttgtctatcttgcttttgattttaaccataggaaaaataggcaaagtatattatctattatttattatttcatacacatcgcactccaaagcctcagccaactgcagaactgtgatgacctgtgccttgttgatgtctctatatcccatctcaaatgcttggatatttctgacagggactccac

SEQ ID NO: 37004 - DNA, 260 bp, Unknown; identical to SEQ ID NO: 35791
  Description of Unknown: RightRegion for integrase B11005 sequence

SEQ ID NO: 37005 - DNA, 260 bp, Unknown
  Description of Unknown: RightRegion for integrase B11006 sequence
actataatatcaaaaataattatagtcaatggaaatattgaaatacagttaaaaaaattttagcataaactatatgccataggaactgcattatgtaagtgctaataaatgccgcacgtatcatgtcaataaataacaggagggtaacgatgatctcacagggaattagtcataccgcatatgatgtaatgagagaatacatgattataggagcagaactagacgaactgccagaaaatcagcgtataaaatagttcgca

SEQ ID NO: 37006 - DNA, 60 bp, Unknown
  Description of Unknown: RightRegion for integrase B11007 sequence
acggagaccagggaaaagctgcggctgctgttcagccagtgggtggagcaggtggtggtg

SEQ ID NO: 37007 - DNA, 260 bp, Unknown
  Description of Unknown: RightRegion for integrase B11008 sequence
actataatatcaaaaataattatagtcaatggaaatattgaaatacagttgaagaaattttagcacaaactatatgccataggaactgcattatgtaagtgctaataagtgccgcacgtatcatgtcaataaataacaggagggtaacgatgatctcacagggaattagtcataccgcatatgatgtaatgagagaatacatgattataggagcagaactggacggaaaatatcagataccgatgttagatagatacgca

SEQ ID NO: 37008 - DNA, 260 bp, Unknown
  Description of Unknown: RightRegion for integrase B11009 sequence
ccaacatataggaattattctgaaaatcaacaacaaaatattggtgtgctaaaacttcattaaccggatggttagtgaaaaaattaccacggtcagtagaaaaccaaccgtggcaaaatgacagaccggaaaggagccgaaccgatctgccaaactatatgaaaattttatatgttagttcatgcctataacatactattataggttctccacatagaacccgaccgtatcgatgcgctgctggtttccgtataggatca

SEQ ID NO: 37009 - DNA, 260 bp, Unknown
  Description of Unknown: RightRegion for integrase B11010 sequence
ttttctataattgataaaatttatatagaaaatcataaagttacaaaaatcgaatttgcttaatccattgtaaacagtacattatagctctgtgtaatttcaatctataaccacatgggcatgggttgaaattacacagaattagcactcgcttaaaatgtttttcatcttttaaacttaatgtaattcttcatccaaatattaatcaaaacatccaatttctgactttgttttaatatttcatcataactataatcgtg

SEQ ID NO: 37010 - DNA, 260 bp, Unknown
  Description of Unknown: RightRegion for integrase B11011 sequence
actataattgataaggtaattgtaggcaaggacgatatagaaattcagctaaaaaacttttagcacttacataatgcagttcctatggcgttaaggtggtgctatacagcatatacactacattctttttgacacatgacgcattatgtgtcttttttattgctattttttaggctatatgttatgttgattgtgtacttaggaggtatattgatgattgatatatctaagctgataaaggctgaatatgagtacataag

SEQ ID NO: 37011 - DNA, 59 bp, Unknown
  Description of Unknown: RightRegion for integrase B11012 sequence
gtctcacgggaacccggaacacaaatgttcaccgccaggttctaccgcccagacgaaat

SEQ ID NO: 37012 - DNA, 260 bp, Unknown
  Description of Unknown: RightRegion for integrase B11013 sequence
actataatagataggattgttatagtcaatggaaatattgaaatacagttaaagaatttttagcagaaacttaatgccatgggcatggcatataggaagtgctaatgccgcatttatcacgtttttataattgcataattttaataatgtcgcttatgtatcatatatatgtctattatatgtcgctatgagcgtctttttttatgccaaaatataatcagaaagagaggtagtgcaaatgttttctgatgaagttagag

SEQ ID NO: 37013 - DNA, 260 bp, Unknown
  Description of Unknown: RightRegion for integrase B11014 sequence
actataattgataaagtgattgtaggcaaggatgatatagaaattcaattaaaaaacttttagcacctacataatgcagttcctatggcattgaggtggtgctataccgcatatacactacattctttttaacacatgacgcattatgcgtcttttttattgctattttttaggctatatgttatgttgattgtgtacttaggaggtatattgatgattgatatatctaagctgataaaggctgaatatgagtacataag

SEQ ID NO: 37014 - DNA, 260 bp, Unknown
  Description of Unknown: RightRegion for integrase B11015 sequence
agtataattgaaaaaatcataattagcaatggaaatattgagataaaattgaaagatttttagcactactataatgctatccaatggtatatatttactgctaatataggtatattaatttagcagtaaaataacgccatacccatggcatggggttagtgctaatgtgcatatttactacacttttgagtcattatagtggcaattattaggcgctattaatggctctttttgttttatgataattacaaagggaggaa

SEQ ID NO: 37015 - DNA, 260 bp, Unknown
  Description of Unknown: RightRegion for integrase B11016 sequence
aaatacttaaaggctattaaagtcaataaagacggtacttttcagcagcctatatttttttaggctgttgttgtactaacatcatagctccatttggagctatgttattagtacaacaattagtaaaagtaataaaagccctatttctagggcttttttgtttattttatgtatcttacaaaaatctcacagccgtaatttgttctgctgccgtcatctagtttattaccgccatatatgtcacagttaatattatcacg

SEQ ID NO: 37016 - DNA, 260 bp, Unknown
  Description of Unknown: RightRegion for integrase B11017 sequence
agtataattgataagattgttatagtcaatggaaatattgaaatacagttaaagaatttttagcacttactatatgctgtgccaatagcattaagttagtgctaatgccgtgtttatcgtactttttacaattaaataaaatcaaactgtcgtttttgtgtcgttaaactgtcgtttttctgtcgctttaagcggctttttttatgtgaaaataaaattacaaaaaggagagtgattgaagtgtacgacgaagatttaag

SEQ ID NO: 37017 - DNA, 260 bp, Unknown
  Description of Unknown: RightRegion for integrase B11018 sequence
cacgctgtaaccatagaacgcaagaagggttggcgtggaaaatggatggtccaatccgcctagaagtctctactggtagagtccagcaaaccgcttcatcgtgacgctgccggtgttgccgtgatagacgagcttccgattgggatcgcaggcgatctggccagcggtgctaatgtctccgcccgagaatggatcctcataggtgaccgacatatcgctgaggtccaggatgcagaaggatcctgatgatgcctgaagga

SEQ ID NO: 37018 - DNA, 260 bp, Unknown; identical to SEQ ID NO: 35560
  Description of Unknown: RightRegion for integrase B11019 sequence

SEQ ID NO: 37019 - DNA, 260 bp, Unknown; identical to SEQ ID NO: 36198
  Description of Unknown: RightRegion for integrase B11020 sequence

SEQ ID NO: 37020 - DNA, 87 bp, Unknown
  Description of Unknown: RightRegion for integrase B11021 sequence
ttaaaatcactaattaataaaatttatattgacggtgaacaagttactattgaatggctctagtagcttgtttatttagattgttta

SEQ ID NO: 37021 - DNA, 260 bp, Unknown
  Description of Unknown: RightRegion for integrase B11022 sequence
gaacgggtggtgctggaactgcagccagccagcgccaaccaatctgaggaggtggcggcatgagcgatctgcgcatccaaaagaccggcgagcctgacatcatcgaaaccagtgatggccgattgacggtgtcggtgccgatccagttcaagcgtcgcagcggccgaaaacttgtcacgcttcccaatggacagacgagccgagcaaggccctgggacacagcggccacacctttgcagttggcactggcccgagggcac

SEQ ID NO: 37022 - DNA, 260 bp, Unknown
  Description of Unknown: RightRegion for integrase B11023 sequence
cggggtataataaaagaaatccgcttcgggttagacaagcggattgaggttgattttctttagtattaacaggatgccacgtacaggggctatataaatagtaataaaccccgcaggtgctttcctgcggggtctttgttaccactcatcgtattccgtttcgctgaactctccgtcctcatcctcgtaactcatgccgctttgccgctcctttatactgccgtatgtatatccgttgtcgtggctgagtacgaacaggg

SEQ ID NO: 37023 - DNA, 190 bp, Unknown
  Description of Unknown: RightRegion for integrase B11024 sequence
ggccgagatgacaccatcaagttcgtttactactccggtatcgaaaacacagtaaaaatataaaaacatcgataaaatctacataatttgtgggtggctaataaaaatgcgagtggctaataaaattcggagtggctaatttgtattaaaatcgtcgtttcaagccatctagaatggtcaggattgatac

SEQ ID NO: 37024 - DNA, 260 bp, Unknown
  Description of Unknown: RightRegion for integrase B11025 sequence
cggggtatcattaaagaaatccgctttggtttagacaagcggattgaggttgattttctttagtattaacgggatgccacgtaccggggctatacagatagtaataaaccccgcaggtgctttcctgcggggtctttgttaccactcatcgtattccgtttcgctgaactctccgtcctcatcctcgtaactcatgccgctttgtcgctcctttatactgccgtatgtatatccgttgtcgtggctgagtacgaacaggg

SEQ ID NO: 37025 - DNA, 260 bp, Unknown
  Description of Unknown: RightRegion for integrase B11026 sequence
gagtgtgttgaaaaggttgttatcgcgggagatgacatagacatacattttagcatatattaataggtactttctcgtgttccaaccatcatcccaacagcggtaggaagtggagaaaaggaagaaaagaccaagattctattatatgattaatatgataaagacaggagctgaaaatataaatatatagattaagataaaaagattttgaaaataattgaaatctcttatttttttacttgactagtggacaccactat

SEQ ID NO: 37026 - DNA, 260 bp, Unknown
  Description of Unknown: RightRegion for integrase B11027 sequence
gagtgtgttgaaaaggtagttatcacaggagatgacatagacatacattttagcatatattaataggtactttctcgtgttccaaccatcatcccaacagcggtaggaagtggagaaaaggaagaaaagaccaagattctattatatgattaatatgataaagacaggagctgaaaatataaatatatagattaagagaaaaagattttgaaaataattgaaatcttttatttttttacttgacaagtggacaccactat

SEQ ID NO: 37027 - DNA, 260 bp, Unknown
  Description of Unknown: RightRegion for integrase B11028 sequence
gagcgcctggtgctggaacttcagccagcgggcgcggcccagcccgaggaggcattggcatgagcgaaatccgcatccagaagacgggcgagcccgacgtcatcgctgccagcgatgggcggctgaccttgtcgataccgatccagatcaaacggcgcagcgggcgcaagctggtcacgctgccgatcgacccggtgaccggcgaaccagccaaggccagaccttgggacaccgccaccacgccgttgcaactggcgctg

SEQ ID NO: 37028 - DNA, 59 bp, Unknown
  Description of Unknown: RightRegion for integrase B11029 sequence
gacttagtgccgataactgagtatgatgagagcaaagtcaaaacattcttggattatgc

SEQ ID NO: 37029 - DNA, 260 bp, Unknown
  Description of Unknown: RightRegion for integrase B11030 sequence
gaacgtctggtactggagctgcgacccacgcaagtggatgccaccgaggaggcaatggcatgagccagatacgcatcgcccagatcggcacacccgatgttatttcttccagcgacggtcgcctgacactgaccatccccatccagatcaaacgccgcagcgggcgcaaactcgtcacgctaccgaatggcgagacagcccagccccgaccatgggatgtcgctgccacgccgctgcaactagcactggccagaggctat

SEQ ID NO: 37030 - DNA, 260 bp, Unknown
  Description of Unknown: RightRegion for integrase B11031 sequence
agggcgcgatctgggcagcgccggttcgacgaggggacggtcgagctgcgtcggaagggctagacccggcggaaccgcgagctggaggatagatggggatgcgggccgtgaagcgttccggcatgtcggttgtgatctcgcccgtgagcacgaggtaggcgccgtctgcgcggatgccggtgatctcgccgacgatcatgcccacctcgtcttcgagccagatctcctgccctgtgaggtcgctcatcggcgtcgtacag

SEQ ID NO: 37031 - DNA, 260 bp, Unknown
  Description of Unknown: RightRegion for integrase B11032 sequence
gagactgaccatgccaccatccaccccgacggaacaatcgctatcgcgttcaacgacggatgagtctgtagttcggctgcaccccttggccccaggtgcatatgacctcaggcttctctatcttcgcagtcaatctgccttaacgcccatcatcatgtatgccatccaggtctaccgtcgataccctcctcacaattggaaccagtgacatttctgcagggttgccaaacggagaaagtatgagtatgtttataaacatg

SEQ ID NO: 37032 - DNA, 260 bp, Unknown
  Description of Unknown: RightRegion for integrase B11033 sequence
ctggcgagcctggcgcgagatctcgcgatgccgacggccgaagcgccgagggcggcagcatgaccggcgctgcgcagatgctgaccgtgcgggtgccgctggcggttcggaagcagcggggcgggcggaagctgatgatcgcgcctgccagcaacacgaagcggggcagcttggcggcggacaccacattggtgaaggctgtggcccgggcgtttcgatggcgacggatgatggaggcgggtcgcttcggcacgatcgac

SEQ ID NO: 37033 - DNA, 260 bp, Unknown
  Description of Unknown: RightRegion for integrase B11034 sequence
gctcttgttgcaaggatagacctattcaatgatactgtaaaaataacatggaaattctcatgactatttttttatagactgtttagccttgattttatccatgggtaaacagtctataaaaaatagcctattctcatgaaacgtattatgagaacatattagcatccaagcattttgttcacaagtgcttggatttctttgtagtcatatcctgccatctcaagcattttctttcttgtgggatttgttttggctgttcc

SEQ ID NO: 37034 - DNA, 260 bp, Unknown
  Description of Unknown: RightRegion for integrase B11035 sequence
agaggtattatatcccgtatcgagtttgattcagacaggtctataaaggttatatttttgtgatgtttgacccgtactaaatagccgtgtccgtcagggcgcagttagttagtacgggttttttgcgcccttttcggcacttccatatcattctctccccgcctatctgatgccagaatataggcatgttcattcaagcaaatctcaaccctcagcacaagcgcacggatgattgtgttgttagggcaatagcaaccgcc

SEQ ID NO: 37035 - DNA, 260 bp, Unknown
  Description of Unknown: RightRegion for integrase B11036 sequence
caatcccttataaaagaaattaaatttgatgaagatagaaattttacaattatttttaggtagtaactagacaatacctgttggatgtgtcctattaccacctattaattaaaataaaaaaagactaggcaaaaaacctagtcttgtatcaggaagtagtagttgtgaagaaagagttgtatcttataatgagagagtggcaggaaacctgcattaatagtattccttaattaattaaattaatgcacaaaaaaaagaga

SEQ ID NO: 37036 - DNA, 260 bp, Unknown
  Description of Unknown: RightRegion for integrase B11037 sequence
agatcgatcgtaagggaaatcacgattagcaaagatagaatattgactgttgaatacttgtgaaaaagagaatttcgcctattttgtgcctatccatcaggatagtatcaaaataggcggaattttattttttgctctttagtttttccaaagtcgccgtgtacagcctgggattgtataccgacaacgcggacataagatcatcgaagaccaacaggagaaacgacgttttgacgccatcacagacggagagaaactcg

SEQ ID NO: 37037 - DNA, 260 bp, Unknown
  Description of Unknown: RightRegion for integrase B11038 sequence
ctggccagcctggcgcgggacctcgcggcgccaccggccgaagcagcgagggccgcagcatgacgggcgctgcgcagatgctgaccgtgcgggttccgctggcaatccggaagcagcggggcgggcggaagctgatgatcgcgcctgccagcaccacgaaccgggggtcctcggctggggacacgacgttggtgaaggcggtggcccgggcgttccggtggcggcggatgatggagaccgggcgcttcgccacgatcaac

SEQ ID NO: 37038 - DNA, 260 bp, Unknown
  Description of Unknown: RightRegion for integrase B11039 sequence
ggggcgcacggcaggcgcgcgttcgacccggagtcggtgcgggtcgactggcgcgccgactagggcagcgcggtatctcggtcagcggtctcggccttgcgaccaggcgtggacggtggtcggcgatcggccgatcgcggccgccacctggcgaatggagccgtggcggagcgccttctggacagcggccttccgggcttccttgacggactgctcgtcggcgtcacacttcgcgagcgcggcctgcagcgcggcgacga

SEQ ID NO: 37039 - DNA, 260 bp, Unknown
  Description of Unknown: RightRegion for integrase B11040 sequence
agaaatttaataaagaaaataaatatagatgaggattttaatatgtctattgattttttatgattatgtatttactaactatcatacaccagttggttattactagttaaaacatactaaaaaagactaggttttattcctagtctatactttttgttttatatgctcctgtgcctttaataattcaattctagaaggttttaaaagaattatagtataatttatcgcttttaacttaaaatgctttaaaacggatttta

SEQ ID NO: 37040 - DNA, 260 bp, Unknown
  Description of Unknown: RightRegion for integrase B11041 sequence
aaggggatgccgaaattattacgtgaatcaataactcaaacgcaatatcgtgaggcagcatgaataaagatattttagaaagtgaaatgactcatattccgatgacgtttcgtgcgcgagcggggaagacagtaatagtcctaccagacggaagtcgcggtgttgtccgaagaggtgcaacgatagataactcaatggtgaaactgttagtacgtggctttcgttggcaacgtatgctttacgaaggaaaattcacttcg

SEQ ID NO: 37041 - DNA, 260 bp, Unknown
  Description of Unknown: RightRegion for integrase B11042 sequence
tggcggtcggtactgactgagatccggtttcacagcgaccggactattgatttgtacttttgaccggtaccaacagaatgctgccgtcctgtgctgttttgttggtactggtcattttttcgcgtttcttccaataaaaaaaagaggccaggatctaagcctgacctcttgaaaaacgtgtgcatgcagtgacggtttttctttatttcatttctacaccagagctgtcataaatatgataaccctcgtgcttgtcgcgc

SEQ ID NO: 37042 - DNA, 260 bp, Unknown
  Description of Unknown: RightRegion for integrase B11043 sequence
tccatcattaaggaaataagatttgataaagacagaaactatgatataatttttttagcttagtcctgtactaagtgaatgcctccatcttgaaaatgtatgatactacaggacaaaaggactggggttttatcctcagtccttaagtctgcgtattatattctcatacattcggggattcactatctgtaaatcatccatcatatcagcgattacaggaattatatccgatacggatcgttcacttatcatttgcgcaa

SEQ ID NO: 37043 - DNA, 260 bp, Unknown
  Description of Unknown: RightRegion for integrase B11044 sequence
gtattcgatacggacagaaatctttctgttttatttttagagcattatgggggttctaagtaaaggtagccgttccgatacagcctattagaacccccacgcctactattatccttattctgaacactgtaagtgtcctttaaatcactcagcttccggttcttcaacctcttccggttcgggtgtcggaatgcagctttaagtaactaaacagtgtgggattctttccaccttttctttgcgtctttcaccgtctgcac

SEQ ID NO: 37044 - DNA, 260 bp, Unknown
  Description of Unknown: RightRegion for integrase B11045 sequence
cggtcggtaataaaagaaatccgcatggatgccggaaagaatcttgatattatttttttgtgatttcatggtattaaacaacgctttccattcggatatagtctgttagtagcacttcataacaaattgaattcgaatgaaaatatttgtgttttgtcgttaaaaagttattgacattcaataacattctgctataatagtatatgtaaggaacagacaacagcacaccgaagggggtaataaaaatgacaaacagacag

SEQ ID NO: 37045 - DNA, 260 bp, Unknown
  Description of Unknown: RightRegion for integrase B11046 sequence
tccatcattaaggaaataagatttgataaagacagaaactatgatataatttttttagcttagtcctgtactaagtgaacacctccatcttgaaagagtatgatactacaggacaaaaggactggggttttatcctcagtccttaagtctgcgtattatattctcatacattcggggattcactatctgtaaatcatccatcatatcagcgattacaggaattatatccgatacggatcgttcacttatcatttgcgcaa

SEQ ID NO: 37046 - DNA, 260 bp, Unknown
  Description of Unknown: RightRegion for integrase B11047 sequence
gaaaagctgataaaatcaataaccattaacgataaatccgtctctattgagtggcttttttaattgcgaagtctttacgtattcattactggctactgtgggagcaggaaacgagtacgtaaacagaaaatcccccgcagcggtgcatccgctgaagggggattttgattattgaccaatatcgcttctctcgatccgccagatggcttgcccgcttgtgaacggattggagaaaatgaactcgtagtaatcagaatcag

SEQ ID NO: 37047 - DNA, 260 bp, Unknown
  Description of Unknown: RightRegion for integrase B11048 sequence
ctggaaaccatgaagcccaaaacgatgggcgcagagttactggaaatggagatgcccgcatgagcgacatgaccgtgagcgacagtacgagcggcgacacctttcggatcaccacgcgcaccccattcaagctcaagcgccgaccaggcatcaaaacggttgtgatgacacccgaaaagaccgaaggtcacgtaaacggcgagtgcatggacaagagcagccaaattgcactgttccagggactcgctcgggcccactac

SEQ ID NO: 37048 - DNA, 167 bp, Unknown
  Description of Unknown: RightRegion for integrase B11049 sequence
agatcagtcattaaagaaatccagattgacgatcacaagaatttaaaggtcatttttttatgacctttttgtagtagtaactaatagtaacctgttctttatttggatagatccttatttttactgcccggtttatctttctcaccctgactctctatatactgatg

SEQ ID NO: 37049 - DNA, 260 bp, Unknown; identical to SEQ ID NO: 36108
  Description of Unknown: RightRegion for integrase B11050 sequence

SEQ ID NO: 37050 - DNA, 260 bp, Unknown
  Description of Unknown: RightRegion for integrase B11051 sequence
cgaaatctcatacaagaaattcaaattgataatagttataatattactattatttttttataattttttctttgactaacgcactatcgccaataggcacgtttatattagtacaagtttttatagcataaaaaaagataggcaaaaagcctaccttttaaagagtgttttagaagaagaaagagtattatggcgtgtacacattaatagtattctttttaactctttttttatacattttaatgcactttttcccaagc

SEQ ID NO: 37051 - DNA, 260 bp, Unknown
  Description of Unknown: RightRegion for integrase B11052 sequence
ctggagaccatgaagcccagaacaacgggtgcagagatgttggaactggagatgcccgcatgatggaaacggctgccagcaaagtcatgagcgacgacaactttcgaatcaccacgcgcgtcccattcaaactcaaacgccgaccgggtatcaaaaaagttgtgatggcacctgaaacggccgaaggtcacttgaatggcgagtgcatggacaaaagcaaccaaattgccttgctccaagggctcgctcgagcacactac

SEQ ID NO: 37052 - DNA, 260 bp, Unknown
  Description of Unknown: RightRegion for integrase B11053 sequence
cgcaatttaataaaagaggttatattagatagtgagtttaatatttcacttgattttatataatctaattcttactaacttatactttcctgtaggggtgttatagttagtatttagggggcttttagccctcttttttatattcaaaatctattttagatagatatacccgctcttttatttttgaagcttttaccctgtccgcataatcatttttaataacccaacgcaacgccgccgccattgctgtattgtctttg

SEQ ID NO: 37053 - DNA, 260 bp, Unknown
  Description of Unknown: RightRegion for integrase B11054 sequence
ataataaaagaaatttatttgaatgaagcctttgaaattactggctttatattttatatctaggacttgtactaaataactatttcctagcggttaacattaattagtacaagtctattaaaaatggcgattagaaattctaaccgccatttattttacgcttttacaatcgcagcgtcaaatcctgctgctttcaatttttcctgcaaggaaatagcatttgctttgttgcgatacgctccgacctgtacacgataaat

SEQ ID NO: 37054 - DNA, 260 bp, Unknown
  Description of Unknown: RightRegion for integrase B11055 sequence
gagttaattaaatcggtgtctgtttctaatggtgaagttatagaaatagaattatttatttagctgaactaattgatactgattgattctagcctcaaattccgcatctgtaatactcattagctctactctaagaggtggttgtaaatgctttattaaagcccatctcttagcatttttgattagtaattctaaaccggacatatggttaatacctggaaaacgtaattattattttaattgaattagatcaaagtgtt

SEQ ID NO: 37055 - DNA, 260 bp, Unknown
  Description of Unknown: RightRegion for integrase B11056 sequence
ataataaaagaaatttatttgaatgaagcctttgaaattactggctttatattttatatctaggacttgtactaagtaactatttcctagaggttaacatcaattagtacaggtctattaaaaagggcgattagaaattctaaccgccctttattttacgcttttacaatcgcagcgtcaaatcctgccgatttcaatttttcctgcaaggcaatagcatttgctttattgcgatacgctccgacctgtacacgataaat

SEQ ID NO: 37056 - DNA, 260 bp, Unknown
  Description of Unknown: RightRegion for integrase B11057 sequence
tcccgcgttctgcgccgcatagaaatagacgccgcccacaatatccacatcttccccgcctgatttttttctccgtggttgggcataaattgatagccctataggtttatcaatttatgcccaaatagcaaaaagctccctgacttcactgcagggagctttttgttattttgtgcgatttttcaggatctcaaggacgaaggttttcagggcagaaagcccggccatgccagcggcaagaagcccggcagaccaagcgc

SEQ ID NO: 37057 - DNA, 260 bp, Unknown
  Description of Unknown: RightRegion for integrase B11058 sequence
ttctggcgcgcgatcctaacgcgcatagagataacagacggtgacatccgtttttatttttagctcggcttgtgtactaattattccgccgcctggggggcggtataattagtagcattatagccaaattatccggctaatttttgcgcattgaaataaccggataacatgctataataaaagacagttaaggcaatccaacaacaaaacttttcggaggtgcgaaacaatgacacattaccttgcgtcagtacaaaaca

SEQ ID NO: 37058 - DNA, 260 bp, Unknown
  Description of Unknown: RightRegion for integrase B11059 sequence
aggtcgatcataaaagaaatctgggttgatgcccagaagaacatccgtgttgtttttttgtgaccttgatgtagtgctaagtaaccttgacgggtccgttgaggtcatttactaccacaattttcttgaactattctgctatatttgctataataacactggcgatacaaacaatccacaattttcatattcacctttcttccctttactttacgggtgacctggttcttctgttgcagcagttgggccaggtctttttg

SEQ ID NO: 37059 - DNA, 260 bp, Unknown
  Description of Unknown: RightRegion for integrase B11060 sequence
ataataaaagaaatttatttgaatgaagcctttgaaattactggctttatattttatatctaggacttgtactaaataactatttcctagcggttaacattaattagtacaagtctattaaatcgaactataatgaatgcattattatcaaacctaggttttactgtaaccattgattttactgtgttttgagcattttttatttgcttataaaatggcaaatttgccattttataagcaaataaaaatgcaacacgaaa

SEQ ID NO: 37060 - DNA, 260 bp, Unknown
  Description of Unknown: RightRegion for integrase B11061 sequence
attattatcaaagaaatcaaaatttaccctgataggcacatagaatattccttaaatgtttgaaaaatttttaatgaattttattacttaatatttctccctctgtagttgcagtaatattatgtaatataatccccgccctcatgagagagcggggactatcatcagtgcttcacgacaaactcatagtaccgagcaagcttgtcgggagcggcgtcctgatcatccagaaacgctttcgcaatttcggcatagaagtc

SEQ ID NO: 37061 - DNA, 260 bp, Unknown
  Description of Unknown: RightRegion for integrase B11062 sequence
gctattatagactatattgaattggataatcaagaggtctcaatacattggaaatttttttagcctcgtgtaacatattgtgtttgaacgattgtaaacgttagaacataatgtgttacattaggccgctttatcctcttcgtcctcttctttggtctcgatcacgaattcagttgttcccgaatccgcaaggccttcgcctatgatgtaaccgaccaccgaagccgccgcaaggattattcctgcgaccttctgtgcga

SEQ ID NO: 37062 - DNA, 260 bp, Unknown
  Description of Unknown: RightRegion for integrase B11063 sequence
tcaatcgaggttgaggggctttacccgaagcaagtcttttttatcggtcaggaaagactctaacgtacatgacagttctgtcacgttacttagaggctaccatccctataccatagtgaagtattttgcaaccttatacggtggtgcgtcctcgtcgttcaggaagtcctgtgccaagtcgaaatagaagtccggagagtcacctgcatatttctgtccagtatccttggagtcgttataatacatattcattgccagat

SEQ ID NO: 37063 - DNA, 260 bp, Unknown; identical to SEQ ID NO: 36057
  Description of Unknown: RightRegion for integrase B11064 sequence

SEQ ID NO: 37064 - DNA, 260 bp, Unknown
  Description of Unknown: RightRegion for integrase B11065 sequence
tggcgcaacctaattcaagaaatacatatcaccgacaacggttacgaaataattttcctatgacagctccggctgtcttttttattccgagtaactatatccaacctgtaggctacgccatgtcagtcggaattttaggcatgaaaaaaggcagtcatttcagactgccttagaaaggaatggtatgctgaacagcatcccagaaaggtgtgggaaacatgaaacccacaatcaaattatagcacgacaagttcagattt

SEQ ID NO: 37065 - DNA, 60 bp, Unknown
  Description of Unknown: RightRegion for integrase B11066 sequence
atcatcaacacattcatttctggtatcgtaatctatgacgaccactcggttattgcctac

SEQ ID NO: 37066 - DNA, 260 bp, Unknown; identical to SEQ ID NO: 36167
  Description of Unknown: RightRegion for integrase B11067 sequence

SEQ ID NO: 37067 - DNA, 260 bp, Unknown; identical to SEQ ID NO: 36045
  Description of Unknown: RightRegion for integrase B11068 sequence

SEQ ID NO: 37068 - DNA, 260 bp, Unknown
  Description of Unknown: RightRegion for integrase B11069 sequence
agtattgtaaaagaaataaaaatatcccccaacgaatttgtggaggatattatatttttttagtttttgttatgcagtaactagccgtaaccaccgggttaaaaccagttactgcataacaaaatattaaaaataaaggagatacagttacattatacagaaagaaagaggacgtttcaagcgccctcttttatttttcgcaaaaccgaacgatattctcgcggatacattgcttctatggctttcatgtgttcgtcaag

SEQ ID NO: 37069 - DNA, 106 bp, Unknown
  Description of Unknown: RightRegion for integrase B11070 sequence
agaagcataataaaggaaataaggattttcaacaaagaagtagttggagtcaattttttataactgttttttggtctaactacttcgcaccattctcaccgataag

SEQ ID NO: 37070 - DNA, 260 bp, Unknown
  Description of Unknown: RightRegion for integrase B11071 sequence
agcattgtaaaagaaataaaaatatcccccgacacttacgtggaggatattatatttttttagtttttgttatacagtaactagccgtaaccaccaggttaaggtcagttactgtataacaaaatatgatagaaataaaggagaagtaattatattatacaagaagaaagaggacgtttcaagcgccctcttttatttttcgcaaaactgaccgatattctcgcggatacattgcttcgatggctttcatgtgttcgtca

SEQ ID NO: 37071 - DNA, 260 bp, Unknown; identical to SEQ ID NO: 37068
  Description of Unknown: RightRegion for integrase B11072 sequence

SEQ ID NO: 37072 - DNA, 260 bp, Unknown; identical to SEQ ID NO: 36170
  Description of Unknown: RightRegion for integrase B11073 sequence

SEQ ID NO: 37073 - DNA, 260 bp, Unknown
  Description of Unknown: RightRegion for integrase B11074 sequence
ctccagctgattgacggggtacatatcgacatggaggacgttcgtatcgattggtcgttctaacgtggggtgggggtgatccccttccttcactataacagagatagccaaattaaacaccccatttattaggctatttgacaaatcatggagaataaaaaaagccgcaggtcttttcctgcggctttttgtttataatccgagttctttcgctttcttctgcacaaagtcacggatagcctggttgatgaattgtttct

SEQ ID NO: 37074 - DNA, 260 bp, Unknown
  Description of Unknown: RightRegion for integrase B11075 sequence
cggtcaattataaaagaaatccaccttgatcagaacaagaatttcaaggtggttttcttataaactatatatggtactaacttacactgtccatctggagaggtatacttagtaccacatcatgcagatgatctttatatataaagcaggaggccgcagggatcaaccccgcggcccgcgctttttcgttaaaaggaaggagtatgaaaaaatcaccaaagaaacactgcactcatcaaccatatacatcataccacatt

SEQ ID NO: 37075 - DNA, 260 bp, Unknown
  Description of Unknown: RightRegion for integrase B11076 sequence
caaaaagcaatgaaaggacgtaataaaaatgaaaaagataacagtaataccacaaacaattaatccgctcacgaataatccgtttaataatgtagagagacgcaaagtagcggcttatgctcgggtttcaactgatagtgatgaacaaatgacgtcacttgatgctcagattgacttttacactaattacatcaaagcaaatccaaagtgggaattcgttaaagtatattatgacgaagggatttcaggaactaacacta

SEQ ID NO: 37076 - DNA, 119 bp, Unknown
  Description of Unknown: RightRegion for integrase B11077 sequence
caaaaagcaatgaaaggacgtaataaaaatgaaaaagataacagtaataccacaaacaattaatccgctcacgaataatccgtttaataatgtagagagacgcaaagtagcggcatatg

SEQ ID NO: 37077 - DNA, 260 bp, Unknown
  Description of Unknown: RightRegion for integrase B11078 sequence
caaaaagcaatgaaaggacgtaataaaaatgaaaaagataacagtaataccacaaacaattaatccgctcacgaataatccgtttaataatgtagagagacgcaaagtagcggcttatgcccgcgtttcaactgaaagtgatgaacaaatgacgtcacttgatgctcagattgacttttacactaattacatcaaagcaaatccagagtgggaattcgttaaagtatattatgacgaagggatttcaggaactaacacta

SEQ ID NO: 37078 - DNA, 260 bp, Unknown
  Description of Unknown: RightRegion for integrase B11079 sequence
caaaaagcaatgaaaggacgtaataaaaatgaaaaagataacagtaataccacaaacaattaatccgctcacgaataatccgtttaataatgtagagagacgcaaagtagcggcttatgctcgggtttcaactgatagtgatgaacaaatgacgtcacttgatgctcagattgacttttacactaattacatcaaagcaaatccagagtgggaattcgttaaagtatattatgacgaagggatttcaggaactaacacta

SEQ ID NO: 37079 - DNA, 260 bp, Unknown; identical to SEQ ID NO: 37078
  Description of Unknown: RightRegion for integrase B11080 sequence

SEQ ID NO: 37080 - DNA, 260 bp, Unknown; identical to SEQ ID NO: 37077
  Description of Unknown: RightRegion for integrase B11081 sequence

SEQ ID NO: 37081 - DNA, 260 bp, Unknown; identical to SEQ ID NO: 36095
  Description of Unknown: RightRegion for integrase B11082 sequence

SEQ ID NO: 37082 - DNA, 260 bp, Unknown
  Description of Unknown: RightRegion for integrase B11083 sequence
ctgttgcagacgattcgggtagatcgggaaggtcaatacctttctgttccgcgtatgttttaagccgaacgcggacggcctcagaaaataacatctagctagccatcggtcgaagaaattgcggcaccggctaaagccatgtgtctgcgaatgctgaggagttgaattgcgtttgagagggtttcttgcatcccatagcgcttcccattgtcgtcaaaaatggcccagccgccaggtacattttgcagataaaaaatcat

SEQ ID NO: 37083 - DNA, 59 bp, Unknown
  Description of Unknown: RightRegion for integrase B11084 sequence
gaccccgaggctctggccgacgaggagaagctcaccgaacgctggggcaaggcttcccc

SEQ ID NO: 37084 - DNA, 260 bp, Unknown
  Description of Unknown: RightRegion for integrase B11085 sequence
atcaaagaaattcgtttcaacaaatccagaaattttttattgatttcgtgtagtgctaattaacatgacagtcatgtcttgttaataaaaacaggctatggtataatggtcatagcaggtttttaaagttttcataattttctacttcctttcttcatgttggctgtacggttcccccttgtccgtacagccattttttattaatcaaattccaaaaaaagaagggatacccgaaggtatcccataaggtttctaaggtt

SEQ ID NO: 37085 - DNA, 260 bp, Unknown
  Description of Unknown: RightRegion for integrase B11086 sequence
cgaagctttgtcgcgaaaatcaccgcagaccccgccaaaaaactgaatgtcgagctgacctgaaggccctgtttacaaatgtttagtacccggacggctattggacggaagtaataccgaccagaaagtgattttgttgattatcagcatttgagtatgaataaaagcgcgatcgtgaagcatttctgctcctcgatcgcgcttttttcaggtgtcaggatacttcggccgcacggcgcaggttacgaagcgcgtctgcc

SEQ ID NO: 37086 - DNA, 260 bp, Unknown
  Description of Unknown: RightRegion for integrase B11087 sequence
tggctgaaggtagtgcacgcagtgacgatggacgctgatttttcgatccttagtttgtactaaaatcattcgtcagttaacgagtgaaataagcacaaaatatttttatataaattcgtcgtttgcttattgactttatataaactctatgataagatacagatgttcccagacgggacgcaaaaagagagacggaggaaacaaacatgaagcgcatcatcaaaggtaaggtttacgacaccgcaactgcaaaagagctg

SEQ ID NO: 37087 - DNA, 260 bp, Unknown
  Description of Unknown: RightRegion for integrase B11088 sequence
gcgatcatcaaagagatcagatggaacatcaaccgtgaatttgaagttatttttttgacctgacgacacctactaagtgaacgtagccatctggtcaaggtaagttagtactggtcaaatagcaatattattacatataaaaaggccccgagaggatcatctcctcccggggcttttgttctatattagatcaaagactctcccacatggctctccatgtcttcgcgccgaccacgccgtcctgagtaagcggatttccc

SEQ ID NO: 37088 - DNA, 260 bp, Unknown
  Description of Unknown: RightRegion for integrase B11089 sequence
cttttagagcttacacaaccgacgttttacgtgcagggcgacgttcttacgctggagttttgacgatgcacgaaggggcactatgttacaatagatgtgcctcacgaggttcgagcctctaggcactctgcgctctggaaggagcaacagcatgtcaaatatagcaccggaactaaaagtatgtttgaaatgtggagtggcatatccacttgatgactaccgtattgagatgagacgaggtaagccatatcgtcggcccg

SEQ ID NO: 37089 - DNA, 260 bp, Unknown
  Description of Unknown: RightRegion for integrase B11090 sequence
atctccatcgggtctttttaccggatattgcatcgctggggcatggcacaatatgtaaaataattttacatttcctatttacaaacgtaaaataatttgacatatataggtcatcaacaacagagacgcagttatgaccacaatcaccaatgtcgacacctacaagtcgcgggaagccatcattctcaccaagccctctgataacctcaactggtgcgttgccgcgtacgaagtcgaggacggctattggttctggcgct

SEQ ID NO: 37090 - DNA, 260 bp, Unknown
  Description of Unknown: RightRegion for integrase B11091 sequence
ataaaccaagtacaagcaagattcatactaaaaacaggaatggagttcatagaaaacctataacaaaaaaacggtaaccacaataatggttgccgtcttttttttgcttaaatttcaaactcatcagctggtaatggtttacactcttgcctttccttatctagtaattgaagtttcggttttcttttacgataatgattcatgtcattaaggatgatatcacacatcttaaacaattctttattaaattcttcaacatc

SEQ ID NO: 37091 - DNA, 260 bp, Unknown
  Description of Unknown: RightRegion for integrase B11092 sequence
cggtcagttatcaaagaaattcggtttggagtcgataagcatatcgacattatttttgtctgatttgtcccgtggtaaatagtggcgtccgtccggatggagtcgattagcacgggacacaaaaaccacgcaaaatgtaaaatagttgttgacatactgtgcaatgcgtggtatcatataatcaagttaaggggtaggataacagtaaaacaaaggaggacaaaatgagatacttcagcgaagaggaaattagaaacctg

SEQ ID NO: 37092 - DNA, 260 bp, Unknown
  Description of Unknown: RightRegion for integrase B11093 sequence
aatttattgattgatcggatcgttcttgaagatgacacgattaaaatcgaatggaatttttaaaaaaaccactcgcttatgagtggttttaattatgctctcgccggcacttccaaaccggcatttttgattttttcaatcaacgtttcagttcttaatctgcgttttccgattcctttgattccgttagcgtttgcgaaatctttcagttgttgattgtatgccaatccagcttcccaacgtctgttaaattcattgtc

SEQ ID NO: 37093 - DNA, 260 bp, Unknown
  Description of Unknown: RightRegion for integrase B11094 sequence
tttgaaggtgagaagataatagttagtttgcttgatgggacggagattgaggttgtaatttaataaaggattaaaaagagatagttgaggtgatatagagtcacttcgggtggctttatgtctatgtcgtattatgtaaaataatgcattatagaaaacattgatttatatgcatgcatatgtatataattgttatggaaattatatgaaacatatcttattattacaaaactttcctcaaattttaaaggacaagcata

SEQ ID NO: 37094 - DNA, 260 bp, Unknown
  Description of Unknown: RightRegion for integrase B11095 sequence
actatcctgcatcatatcgagataaaaccggacggaacgtacaagccgttgttcaacggttaagtgtcattcctataacgcaccaccagtagccatataaaaatgccccaggcggaccaaacctggggcgcggcgggtggagggatcccgccaactccgggcggagaaggagcaaaacgcccggaaacctatgcaattttataacccatcgggtatgtttcgtattgcttcgtcgtgttttgtacccgatatgatacaac

SEQ ID NO: 37095 - DNA, 260 bp, Unknown
  Description of Unknown: RightRegion for integrase B11096 sequence
gaagggatcgcgggcgtcatccgcgagatggtcgcaccgcacaatctggaggccgccgaatgacgaacgccaatgacacgatccgcgtgctgatcccgttgaaggtccgcaagaagaacggtcggccaaaaataatgccgcccgccaactatctgccgagcgaggaccagacgcaggatccgcatgtcctgcgcgccgtaggccgggcatggggctggcggcggcgcatagaggcaggcgaattcagcacgatccaggaa

SEQ ID NO: 37096 - DNA, 61 bp, Unknown
  Description of Unknown: RightRegion for integrase B11097 sequence
ttcatggcgcagggctatatcgaccagatcctttataacgaggagatgaacaccctgctcg

SEQ ID NO: 37097 - DNA, 260 bp, Unknown; identical to SEQ ID NO: 37090
  Description of Unknown: RightRegion for integrase B11098 sequence

SEQ ID NO: 37098 - DNA, 260 bp, Unknown
  Description of Unknown: RightRegion for integrase B11099 sequence
gacggcatcggtggggtcatccgcgagatgatcgcacccgctcgcatggaggctgcggagtaatgacgcaagccaatgacacgatcagggtgctgatcccgttgaaagtgcgaaagaagaacgggcggccgaagctcctgccgccggtggattatcgcccgagcgaggaccgtactcccgatcctcacgtcctgcgcgccatcggccgggcgtggagttggcgccgccgcatggaagccggagagttcgccacggtccat

SEQ ID NO: 37099 - DNA, 260 bp, Unknown
  Description of Unknown: RightRegion for integrase B11100 sequence
acacttatcgaccacatagacattgacgaaagccgcaatatgcggttgttttttaaggcgtagtatgtactattgtgttggcaacgacggctgcgcagtcaatagtacatacttagcgcccaacaatgaacggacgaacgctgtattttgcgccatccgtgccatgtgtggtaatccaaatctgcgcgttttcttcggtgaaaaacaggcaacttgtaggctctccatcacggaggacttcccaaaactcgttgctcatt

SEQ ID NO: 37100 - DNA, 260 bp, Unknown
  Description of Unknown: RightRegion for integrase B11101 sequence
aaactaaagctaaaagaaatccggctgtaccaagatcgccggatagacttcgatttcctttaattccatagttacacctaaccaaatggttaatgtaatctatggaacgcccccgcccattgtaggcgggggcacaatttattcatgttccacgatcccgtggtaatacgctgccagctttttctttgctcccgggccgtccttgtccatcagaaatgcccttgccatatccgcgtaaaactccgcaatggacacgccgt

SEQ ID NO: 37101 - DNA, 260 bp, Unknown
  Description of Unknown: RightRegion for integrase B11102 sequence
aaactaaagctaaaagaaatccggctgtaccaagatcgccggatagacttcgatttcctttaattccatagttgtacttatccaaatggttaatgtaatctatggaacgcccccgcccattgtaggcgggggcataatttattcatgttccacgatcccgtggtaatacgccgccagctttttctttgctcccggaccgtccttgtccatcagaaatgcccttgccatatccgcgtaaaactccgcaatggacacgccgt

SEQ ID NO: 37102 - DNA, 260 bp, Unknown
  Description of Unknown: RightRegion for integrase B11103 sequence
ttgcggtcggtgtccattgcccgtcgcggacttgtcgccggtattcaggttcgaacgacttgaggcggctcagcagcgcttcgcgcagggtgagtggcttgctcatgccgcccccttgaagctggcgcaccagcgggcgaactcgatgccctcgtccttgggatccgggaagcccaggccgcagcgctcagagctccagtggatgcactgctcgcaggtggtggtggactccaggtccggcagcccgaccgccaggccgg

SEQ ID NO: 37103 - DNA, 260 bp, Unknown
  Description of Unknown: RightRegion for integrase B11104 sequence
cgaagcgtcatagaccaaatatacttcgataatgacaaaaatattaagattgtgtttcgctaatcagactcacgttaatggaagtatccgtgcggatagtaccgattacttgcggtttaggaatccaaacatttgttctgtttttaggataacaaaaaaggggagtcttttcaactccccatagtgaaaaacatatatgcacagtgatgtttctctcggcttatggaactgtagtgcctcagagtgggctaataagaatc

SEQ ID NO: 37104 - DNA, 260 bp, Unknown
  Description of Unknown: RightRegion for integrase B11105 sequence
acacttatcgaccacatagacattgacgaaagccgcaatatgcggttgtttttcaaggcgtagtatgtactattgcattggcaacgataggtgcgttatcagttgtacacgattttgccaaaaaatgcgaactctccgtaatatccgtgcaagatattacagagagttgatataggcttagcggtttcgtcaaggataataaggctctattgtgtaggttgcgccatcgtactgctgactgatatagtattcagcgtttc

SEQ ID NO: 37105 - DNA, 260 bp, Unknown
  Description of Unknown: RightRegion for integrase B11106 sequence
aaactaaagctaaaagaaatccggctgtaccaagatcgccggatagacttcgatttcctttaattccatagttgcacctaaccaaatggttaatgtaatctatggaatgcccccgcccattgtaggcgggggcataatttattcatgttccacgatcccgtggtaatacgctgccagctttttctttgctcccggaccgtccttgtccatcagaaacgcccttgccatatccgcgtaaaactccgcaatggacacgccgt

SEQ ID NO: 37106 - DNA, 260 bp, Unknown
  Description of Unknown: RightRegion for integrase B11107 sequence
gacgggttgagctctgtcgtgcgcgacatgctcgccccgcggccgaaggagaaggtcgcatgagcagcgcgcccgcgacactgaccgttttcattccgctgaccattcgcaaacgcaatggccggccgaagatcatgccgccggcggagatgatgcccgattacgacgacaaaggcgtggatccgcacattctgagggcgatagccaaggcatggagctggcggcgcaagctcgacagcggccaggtggcgaccattcag

SEQ ID NO: 37107 - DNA, 260 bp, Unknown
  Description of Unknown: RightRegion for integrase B11108 sequence
gtcgatggacttatgggcctcgcgcgcgaggtgctggccggcggcatcggagaagcggcgtgacccgcgccacgccgatcccagataccgtgacgctgcatgtcccgctaacgttggtaaagcgcggcggacgaaaggagatgcagctacccgagggtgccgcgcagccgcgcaggaccgacaacacgctggtcaaagcactggcccgggcatttcgctggaaacgcatgctggaatccggcgacttcatgaccatcacc

SEQ ID NO: 37108 - DNA, 260 bp, Unknown; identical to SEQ ID NO: 36042
  Description of Unknown: RightRegion for integrase B11109 sequence

SEQ ID NO: 37109 - DNA, 260 bp, Unknown
  Description of Unknown: RightRegion for integrase B11110 sequence
agcatgaaagactcggcaaaggaaaggagtctaaagcagtggcaacaccggaaaagcaaataacgataatcccaggggtcataaaatacaccgaaggatttgaatcaggatatcctggcaaaagaaaagttgctgcatatgccagggtctccacaggaagcgaggagcaactgacatcgtacgaagcccaaaaggactactacgagatgaaaataaaagaaaatccagtctggcaatatgcaggtatttatgcggacgag

SEQ ID NO: 37110 - DNA, 260 bp, Unknown
  Description of Unknown: RightRegion for integrase B11111 sequence
aaggtccttacaatcgaattcaaggaatctgagacaagtgcagaaaaaaataaaaaaatttaattccataataggaattaaattgacaacaaggaatataagtgatattatatagatgcgaggaggagatgagaatggataagaataagaaagccattcttgcacagagagtaaaagagaggatgaggatgcttgacatgaatgcactacagctttcagagagaagtggtgtatcacagagcatcataagccgtctaaca

SEQ ID NO: 37111 - DNA, 260 bp, Unknown; identical to SEQ ID NO: 35754
  Description of Unknown: RightRegion for integrase B11112 sequence

SEQ ID NO: 37112 - DNA, 260 bp, Unknown
  Description of Unknown: RightRegion for integrase B11113 sequence
aaactcaaaataaaagaaatccggctatacaaagaccgccggattgaatttgactttctgtaattacttagtttatataatccgttaggttgcataaaactaagtacacaagaatatcccccgccaaaacaggcgggggatactttatcctcgcatctttcgcatcacgttatcatacattcgcgcgttggtcactttcagcgcatccatcaactcgtccactatggcccacgcctgttccggcgcgcgggatgataccg

SEQ ID NO: 37113 - DNA, 260 bp, Unknown
  Description of Unknown: RightRegion for integrase B11114 sequence
ttgatcgaaaaaataatcatcaatcaggacaaacagatcattgacattatctttaatacatgaccatgtgtgtatctttggattgcccgaggaaccccccaagttacacacattaaaaagaaaaggcgatggattaacagtccaccgcctctctttttattgaatttttcgcataacactgtcataaagccttggattgaccaccataagagtagtcataagctcgtccatgaggagccacacactctctgcatttctgc

SEQ ID NO: 37114 - DNA, 260 bp, Unknown
  Description of Unknown: RightRegion for integrase B11115 sequence
attattaaacagatcgtggtcgaccttgacggccatccggtagatgtaatttttttagactaaaaatgtactaacaggttgcgtcctgcgtcattgttataaaaagtacattataaaatacataaaaatacaaaactttttttataaaatcacttgctatatgtgtacccatatgttatagtatagatacaagttgagagggaattgaaacagaaaaggagaaagaaatgtttaaggattacagatatatcaatgcagga

SEQ ID NO: 37115 - DNA, 260 bp, Unknown
  Description of Unknown: RightRegion for integrase B11116 sequence
gatggcatcgccggtgtgatgcgggacctgatggtgccacgcaggcttgaggccgcagaataatgggcgtgtccgacaccatccagatctttgtacccctcaaacttcgcaagaaaaatgggcggccaaaaattctgccgcccgccgattacctgccgagcgaggatcagacacaggacccgcatatcctaagagccatcggccgcgcgtgggcctggcggcggcgaatggaggccggtgagttcggaaccgtgcgcgat

SEQ ID NO: 37116 - DNA, 260 bp, Unknown
  Description of Unknown: RightRegion for integrase B11117 sequence
attgacgtttattttgccgatgtatatactagtggcaatgcaacagatgttgacttgtcataagtagatagacggattattccaaaatcttcgcatttctgcacttttgccttaactttctaatatggcaacgatgattccaactatagttcgaacaatccagacggttttgcttgaaacccgattttttgctgattttgcggctggtaagggtttagcaatataggtaatatctctacactaccaagtctggaaacgcc

SEQ ID NO: 37117 - DNA, 260 bp, Unknown
  Description of Unknown: RightRegion for integrase B11118 sequence
gtggtgagcaaaattcttgttgacgagcagaacaatatcagcgtggagtttctaaccttttagggaataccgtcacacattacgcagaaggatagaaatttggagaaaaaaataaccaccgccgtagcggtggaattctgggcggtgacgagggaacagaatcacgcgtccaagctgttatactgtttacgcttgacattgatgaacgcgccgatgaacgccgccgcaatcgcaagcgtcccgcagatttccttggcata

SEQ ID NO: 37118 - DNA, 260 bp, Unknown; identical to SEQ ID NO: 36134
  Description of Unknown: RightRegion for integrase B11119 sequence

SEQ ID NO: 37119 - DNA, 260 bp, Unknown; identical to SEQ ID NO: 36086
  Description of Unknown: RightRegion for integrase B11120 sequence

SEQ ID NO: 37120 - DNA, 260 bp, Unknown; identical to SEQ ID NO: 35977
  Description of Unknown: RightRegion for integrase B11121 sequence

SEQ ID NO: 37121 - DNA, 260 bp, Unknown
  Description of Unknown: RightRegion for integrase B11122 sequence
cttcgatcggtaacggtgggggaacgtggcgacccgatcgaacctcttcctcgtagctgctgagcatcgagagcagggcttcgcgcactgtctttgggtggctgcacttccgcatcctcacccctctacgacgtacagattgcagtccctggcgaaccctggaccctcttcgatggggtccgggaatcccaggctgcaaccctcgcccagccattcgcggcagtgttcacaggagcgttcaccgcgacgcggtggtgggc

SEQ ID NO: 37122 - DNA, 260 bp, Unknown
  Description of Unknown: RightRegion for integrase B11123 sequence
tggaggggcatggttaaagaaatcgtgttcttccctgatcgccatctggagctgcatttttagtggttcttatgcaacccatccatctggattattccactaagtaccacacagaaaagccgcccatccgggcggcctctgtctactcttttgtctcgaccatggcgatcacgtcaaccagcgcgctaagcgtctcgacgctcaggcgctccacagcctcggcggggatcttgtcccaagcggcccggaacgtctcgcca

SEQ ID NO: 37123 - DNA, 260 bp, Unknown
  Description of Unknown: RightRegion for integrase B11124 sequence
aaaagcgttgtagataagattgtcacagacggagaaaacttcaacgtgatattcaggtcttaaaagatactatttcaacatagacagttgttcacgttgatttagtatctaatgcagaaaagggggcggtatttccgtccccttccctgttggagaagttactccctctccatctgttcgatcatgcgctgaatgctcatgcgagtcttttcatcaggcgcttcatccattgtgcgccgcaggttttcaatgtactcctg

SEQ ID NO: 37124 - DNA, 260 bp, Unknown; identical to SEQ ID NO: 35988
  Description of Unknown: RightRegion for integrase B11125 sequence

SEQ ID NO: 37125 - DNA, 260 bp, Unknown
  Description of Unknown: RightRegion for integrase B11126 sequence
atcgagcgaatagaccttgatgcggaaaacaatccgcatattgtgttccgctctggtatataatccttcactatgggacagcattgttatgaattatatacctagcaaagggagggcgattgccctcccccgctttacatctgactgtacagctgctgataccgcttgaccttctcggccttctcgatgcttttcttatgcagatagtcatagactgccatcatgttctccggcggatctccatgctcccggcgatagtc

SEQ ID NO: 37126 - DNA, 260 bp, Unknown; identical to SEQ ID NO: 36055
  Description of Unknown: RightRegion for integrase B11127 sequence

SEQ ID NO: 37127 - DNA, 260 bp, Unknown
  Description of Unknown: RightRegion for integrase B11128 sequence
acggtcagtaaaattgtcatcacaaacgaagatgacttttttgtgtatccgacttcgccataattattgttacctgtatgttatactattattggctaaatagaaaaaccgccccgaaggacggcttttctataagcgttggcccctattttaccacgcattcgtaatatctcgcggcttttccaggccgaacatctttatctttcaaaaaggcatttgccatatcagcgaagaaatcgacgctaccgcagacattgtgc

SEQ ID NO: 37128 - DNA, 62 bp, Unknown
  Description of Unknown: RightRegion for integrase B11129 sequence
ggaacattgttggtagtgttcctggatggaacggagattgaatgtaaaaatgaagaggaata

SEQ ID NO: 37129 - DNA, 260 bp, Unknown
  Description of Unknown: RightRegion for integrase B11130 sequence
aaattgaaagcgaagattaaggaagcggaaagacaagaagagttaaaaaggagggtgcaataatgccgaaggttacagtaattccagcaacaaaggatttttataccggcgttgataataacacgttcaaaaagaaaaaggtggctgcatatgcgcgagtttccaccgcaagtgaagaacaggaaacctcatacgatgcgcaggttgattactatacgaagtatattcagggacgaccggattgggagtttgtaaaagtt

SEQ ID NO: 37130 - DNA, 260 bp, Unknown
  Description of Unknown: RightRegion for integrase B11131 sequence
aagcaggaagcccgtgaacgcaacctcaggaaaggaaacaccccatgcaaacaacccgcgtaaccctcatcccgcccaccatgagcctgcacaccgcggcgccgctgtccaagaccgctgttcgccgggtctgcggctatgcccgcgtgtccacggacaatgaggaacagttgggcagctatgaggcgcagatggcctactacacccaattcataaaggagcacgagggctgggcctttgtcgggctctacagcgatgag

SEQ ID NO: 37131 - DNA, 260 bp, Unknown; identical to SEQ ID NO: 35701
  Description of Unknown: RightRegion for integrase B11132 sequence

SEQ ID NO: 37132 - DNA, 92 bp, Unknown
  Description of Unknown: RightRegion for integrase B11133 sequence
gagtttgtgctaaaggctgtagcgaatccgactgaggtaactcaagtggagttgcgtatttagcttttttataatcttcaattaaagatata

SEQ ID NO: 37133 - DNA, 260 bp, Unknown
  Description of Unknown: RightRegion for integrase B11134 sequence
gagtttgttctgaaagtgacagcgaatccgactgaggtagttggagtggatctaaggatttagctttcttataatcttcgatcagggagataagaatatcttttatagacagaaaggtaatacctaattagtgagtcttaactatctatacaagttaagataggtacgtatgtaattacggatacaaaacgacagccctcacccttacaagtctcttaatgttacttccggttgaaacttagtttgtcttttagcgttac

SEQ ID NO: 37134 - DNA, 260 bp, Unknown
  Description of Unknown: RightRegion for integrase B11135 sequence
gagtttgtgctaaaggctgtggcaaatccaactgaggtaactcaagttgacttgcgtatttagctcttttataatcttcaattaaagatataagaacgtcttttactgacaaataagtaataaattctaggagaaatatattaactagctttctagatgtgcaaacgtacgttactgaatatagccagcggaactgtctttacatctcgactgcaaatacattttagctgcttctatcataacatcattaagagttgaat

SEQ ID NO: 37135 - DNA, 260 bp, Unknown; identical to SEQ ID NO: 36051
  Description of Unknown: RightRegion for integrase B11136 sequence

SEQ ID NO: 37136 - DNA, 260 bp, Unknown; identical to SEQ ID NO: 36067
  Description of Unknown: RightRegion for integrase B11137 sequence

SEQ ID NO: 37137 - DNA, 260 bp, Unknown; identical to SEQ ID NO: 36072
  Description of Unknown: RightRegion for integrase B11138 sequence

SEQ ID NO: 37138 - DNA, 260 bp, Unknown; identical to SEQ ID NO: 36141
  Description of Unknown: RightRegion for integrase B11139 sequence

SEQ ID NO: 37139 - DNA, 190 bp, Unknown; identical to SEQ ID NO: 37023
  Description of Unknown: RightRegion for integrase B11140 sequence

SEQ ID NO: 37140 - DNA, 260 bp, Unknown
  Description of Unknown: RightRegion for integrase B11141 sequence
gaaatgaaggaaactgcacggcaaagaacactacaacgctacgcaccaaaggaggtggagtgatggcaagagaagtaagggtaatccctgcaagtgtacacaaatttacgaccgttccttttggctctacggtaaggaaaagggtcgcaggctacgctcgtgtttctaccgaccttgaggaacagctcacaagctacgaggcgcaggtggattactacaccaagtacattcagaacaatcccgattgggagtttgtcgag

SEQ ID NO: 37141 - DNA, 260 bp, Unknown
  Description of Unknown: RightRegion for integrase B11142 sequence
gtgcggcaaatcacagttgatgcggagaatcacatagaagtggagtttatcccctttgggtaaactccttggcgtgttaccaaaaaggggaaaaagagtggagcagattcaattctgctccaagtcttttctgataagtgctttgatatatccttgaacgttgctaatcgttcgtaaccgttctatgatgtccgcatccgttgccttgttcagcttcatatgcacttgtatggtattcgccgcatcatactttgcgttcg

SEQ ID NO: 37142 - DNA, 260 bp, Unknown; identical to SEQ ID NO: 36091
  Description of Unknown: RightRegion for integrase B11143 sequence

SEQ ID NO: 37143 - DNA, 260 bp, Unknown
  Description of Unknown: RightRegion for integrase B11144 sequence
atgaaggaacaggctcgattaagagcactcaaacaacatcatggaggtagagaaaatggctaaagtcacagtaataccatcaacaattaatcccattacccaaatgccactaaatgcgaatcaagttaagaaagtagcagcatatgcaagggtttcaacaaatagcgatgagcaatatactagttacgaggcacaagtgaatttctataaaaaatacatccaggagaaacctgactgggaatataccgaagtatacgctg

SEQ ID NO: 37144 - DNA, 260 bp, Unknown
  Description of Unknown: RightRegion for integrase B11145 sequence
ctgtcggcggtgcgggtggggcctggggggcagccgctgcgagctctgcagcgaacgatgtgaggcgtgactggagggcttcgcggagggtcacatgcagcgctctgatgcgcaaacggtagcgcaagcgcttgcgatcttgagcacccccaacccgatatctaacaatccgccgcagatatgcggcactaccgctaatgggcgcatctgcaggccatgatgcccaggcacacagaaccacgggccatggccgccaacga

SEQ ID NO: 37145 - DNA, 260 bp, Unknown
  Description of Unknown: RightRegion for integrase B11146 sequence
tggaaccgcattatagaccatatggagtttacctcgctagacgatatcgaggtgtttatataaaaagaaagccccgaaaatagggctttcataagtagtcataaaattagtgtattatgcttccaatgcctgtgtcatacacttataatacactaataaacgcaagcatcaattatacttaatatagcaaaaaggagtggcaatttctaccactccttcatctttcgcataacagcatcatataaccttggctgtagtac

SEQ ID NO: 37146 - DNA, 260 bp, Unknown
  Description of Unknown: RightRegion for integrase B11147 sequence
cggcggttcgacgccaccagactgagcatcgagctgctgcgcggcgttgaagttcgggagtgaaggccccaatgatcttcacagggctttccacagtcgctccgcagtcttgcgtccgataccgggaacggtcatgagctcctcaacggtgacgccccagctcaccggcataccgagcgtgtcgatgatcgtttcggccgtcttgactccgaccccagggagaccctggaggaagtggatctgccagtcgcggtggccgg

SEQ ID NO: 37147 - DNA, 260 bp, Unknown
  Description of Unknown: RightRegion for integrase B11148 sequence
gtatataatgagcataaattggaaaccgtgattcaaacaacaaataaaggtcaaaaaacgtgattctttgtctgaataggttgttttattgcacttttcaccaatgattacaagtttacatgagtacactaaagtttttgcgcaggagcgcattttggatgtgggggtatatctttatatacccaaaataaaaaccgctctcagacgattctgtggcctctgagggcataaaagaaaaagacccctcccggttttgggaa

SEQ ID NO: 37148 - DNA, 260 bp, Unknown; identical to SEQ ID NO: 36169
  Description of Unknown: RightRegion for integrase B11149 sequence

SEQ ID NO: 37149 - DNA, 260 bp, Unknown
  Description of Unknown: RightRegion for integrase B11150 sequence
gaagaggctaagctggaggccagggatagggcgctagcatatcagaagggggttaagatttgagtgtagcacgggcagtaacagtaataccggccaaagtcagtttggtgtcgcatactgtgaaaaacctatcgaaaaaaaaggttgcggcctatgcgcgagtatcgaccgcaagtgaggagcagctttccagctatgaagctcaggttgattactatacaaggcatattaaggctaatccggattgggaattcgttgaa

SEQ ID NO: 37150 - DNA, 260 bp, Unknown
  Description of Unknown: RightRegion for integrase B11151 sequence
gaaaaagccaagctaaaggctagggaaagggcactagcacatcagaagggggttaagctttgagtgtagcacgagcggtaaaagtaataccggccaaagtcagcccaatatcacaggctgtcaataacataccgaaaaaaagggtagcggcttatgcgcgagtatcaactgatagtgaggagcaactttccagctacgaagctcaggtcgactattatacccggcacataaaatcaaatacagagtgggaattcattgaa

SEQ ID NO: 37151 - DNA, 260 bp, Unknown
  Description of Unknown: RightRegion for integrase B11152 sequence
gtgctgcgctcggtaacggtgaaccggggcggtagccagattcaagctcagccgcgtagctgaccagccgtgactggatcgcctcacgcagggtcatcgccatggcaccgcttgatctgagtcgagactagcagggtttgtaggtcgggactgagatcaggaggacatgacgttggcggtcaccacatactcggtgccctgcttcttgcgctcgcacatggccgtgccctggccgtagccgccaaagccgttcttggcgc

SEQ ID NO: 37152 - DNA, 260 bp, Unknown
  Description of Unknown: RightRegion for integrase B11153 sequence
cgcggaacggttgatacaatagagcttgacgcggacaacaccccgcttattattttccgctgaggtatatttagttacattgaacaacagacaagtgtaaatttgtatagtttgacaggcttttctttttcgtctgcaccgcatataattatcttacaagaggtgttgtattgccggatgcaagaccgattataaacaagtataaaacctgtttgtgaaagccaccggcatggcgagtagcaggcgggtttttatatttt

SEQ ID NO: 37153 - DNA, 260 bp, Unknown
  Description of Unknown: RightRegion for integrase B11154 sequence
caaacggtactccgggctatcacagtcaacgccgaccgttctatcagtctgactttctgctaacgttcaaatctggttaccttatctttctataacatcagacaagccgccataaagtaaccacaaaaaaagcccccgctttgggggccttttgttatttgtccagttgccaacttccaatcgttgtcgtttccgtgaaccttatttaaaataatttttgcaataaaaaaagccccagatttctctgaggccttaaaacg

SEQ ID NO: 37154 - DNA, 260 bp, Unknown
  Description of Unknown: RightRegion for integrase B11155 sequence
aagtctgtgatagataagattgatgttgatagggataggctaacagtagtgtttagaacctaataagtgctatttcacacttgacggtcgttcaatgtgacgaaacacttactaaactcaactccgtaagacaaaactcaactccgtaagacaaaactcaactccgtaagacaaaactcaactcagagttgacttatctcttgcaatactcagcgcatatcattctcccaaagcagttcataaaacctctcaaggatagc

SEQ ID NO: 37155 - DNA, 260 bp, Unknown; identical to SEQ ID NO: 36058
  Description of Unknown: RightRegion for integrase B11156 sequence

SEQ ID NO: 37156 - DNA, 61 bp, Unknown
  Description of Unknown: RightRegion for integrase B11157 sequence
gagtcggcggcgctacgggcgaaggccgagacggcggggagcacccgccccccggcgacgc

SEQ ID NO: 37157 - DNA, 260 bp, Unknown
  Description of Unknown: RightRegion for integrase B11158 sequence
actgagagtagcagcatattgccgcgtgtcaacagaccaagacgagcagctattaagctatgagaatcaagtaaaatattatacagagtatataaaaagtagggatgattatgaattcacaaatgtatatgcggatgaaggaatatccggtacctcaacaaaaaaacgtgataatttcctcctaatgatagccgactgtgatgctggtaaaattgactttatcatcacaaaatcaatctcccgatttgcaagaaatacga

SEQ ID NO: 37158 - DNA, 260 bp, Unknown
  Description of Unknown: RightRegion for integrase B11159 sequence
agggcattgcacataagaaaggatggtcgtacctataccttgactggtgttgaactcctgtagtttttagtatgataaaaagtttactgcgatggagaaactttgtacacatctaaaactattagtgctataatatctttagacatagtgttaacctctttcattgtcgtaacttttcagtttcatacaagcgatccaattaaaaaggcgggtgtttccaaaacggaaacacccactttttttatctgcctttcgtctcc

SEQ ID NO: 37159 - DNA, 260 bp, Unknown
  Description of Unknown: RightRegion for integrase B11160 sequence
atgcttggtgaagacggcagcattaccgtaaagtttttagaaggaacagaagttaatttataggccatagttaagagagtaaatactctagctatggctttttttattttaaattttttaatttgtaattgtatttaaataggtagaagtgttataataaagaaaacgctttagtaagttgaggttttatggatttctatactttgtcagagcatattctgggctatacaaacagttttggagaagtcgagcttggaaaa

SEQ ID NO: 37160 - DNA, 260 bp, Unknown
  Description of Unknown: RightRegion for integrase B11161 sequence
acacctgaaatgaaagaaagagcaagacaagctgaattgatgagaaaaggagcacacagatgaaagaaagaatagttcagataataccagccataaaagacccaaaaacaagaagattattagctgaaaacaaacgaagaaaggttgcagcttacgctcgtgtttcaactgacagcgaggaacaaaaaacgagttatgttgcccaaatagattattacactaactatattaattcccatgaagactgggatttcgtaaaa

SEQ ID NO: 37161 - DNA, 260 bp, Unknown; identical to SEQ ID NO: 36714
  Description of Unknown: RightRegion for integrase B11162 sequence

SEQ ID NO: 37162 - DNA, 260 bp, Unknown
  Description of Unknown: RightRegion for integrase B11163 sequence
gtgctggattcgctgcaggtaggtcgatctggggaagtccacgctcagccgcgtagctggtgagcctgctggccagggcttcgcggagggtcacggctgatcggtgctcatgctcaacattctgatccccaccccaccaccgcgtcaagatcagcactccaagcacggtctgcagcacatacgcagatcacagttgtgatcgggggcctgagggtcttaggctctggctaaggacatcactgctacccatgagcaacacc

SEQ ID NO: 37163 - DNA, 260 bp, Unknown; identical to SEQ ID NO: 36020
  Description of Unknown: RightRegion for integrase B11164 sequence

SEQ ID NO: 37164 - DNA, 260 bp, Unknown
  Description of Unknown: RightRegion for integrase B11165 sequence
gtgttgcagacagtggaggtaggtcgaactggggaagtccgcgctcttccgcgtgccttctgagcatacttaacaacgcttctctaagagtcactattactctcctgaaacgttgagcagtaccgtgcaaacagcggcccttcatgccgtacttcagggatgccatatccacaatggccacaccaatggatgcactggcggcacgtgcggccgccccagcgtggcagctctggaaacacttcaccgtgggattcaccacg

SEQ ID NO: 37165 - DNA, 260 bp, Unknown; identical to SEQ ID NO: 36207
  Description of Unknown: RightRegion for integrase B11166 sequence

SEQ ID NO: 37166 - DNA, 260 bp, Unknown; identical to SEQ ID NO: 35952
  Description of Unknown: RightRegion for integrase B11167 sequence

SEQ ID NO: 37167 - DNA, 260 bp, Unknown
  Description of Unknown: RightRegion for integrase B11168 sequence
ataaaggcaatctggtataataacgacggcgacaatctcacgctggagatcgaaacgctatagccggtaacatggcgaaaatatacttatgtttgcttcatgataccggggcaatatcggcgtatcttctccagcaattacacaattactgcaactactggagagaataggcaataaaagagccggggattattccccggcttctttcttttccgtctcgatcaacaggcgcaaggcccgcttgattattctttatccat

SEQ ID NO: 37168 - DNA, 260 bp, Unknown; identical to SEQ ID NO: 36074
  Description of Unknown: RightRegion for integrase B11169 sequence

SEQ ID NO: 37169 - DNA, 260 bp, Unknown
  Description of Unknown: RightRegion for integrase B11170 sequence
tacaaggaggtgagctacaatgccgccgcccaagagctgaacatcgtcaaatactctgcctgaacaccatgcgaaccacctctacagaagtcatcaagctggctctccgccgcaattccaagagccgcctcgtactcaccctaccggaaccgccatccctgaaaatgggcaaccgcccgacaaaacgagccattcgcatggccaacgccctcgtgctggagcagaagctacacgcgggggagttccgtagcttaacggac

SEQ ID NO: 37170 - DNA, 260 bp, Unknown; identical to SEQ ID NO: 36145
  Description of Unknown: RightRegion for integrase B11171 sequence

SEQ ID NO: 37171 - DNA, 260 bp, Unknown
  Description of Unknown: RightRegion for integrase B11172 sequence
catttagttgagcgcgttgtgattgagcgcagggaagtggtgaacgtggtgcttcgcctttaatgtgtctagttgcggccctcaacaacaattctttaagtgaggtgttactcatttgccagcccaactactaacaactgcaccctcagccttcattgtcacagcacctcgtagcagaggtgttgcagcatcctccatctcaccaattacaatgcccagcacctcatccccctgctcaggtaaacactcaacaagcactt

SEQ ID NO: 37172 - DNA, 260 bp, Unknown; identical to SEQ ID NO: 36069
  Description of Unknown: RightRegion for integrase B11173 sequence

SEQ ID NO: 37173 - DNA, 260 bp, Unknown
  Description of Unknown: RightRegion for integrase B11174 sequence
agcgtggtagaccacatcaccgctgacgacctcggccacatcgaggtatatttttacccataactgttactattttatcgttgccacatgcctgcgaataaatagtagtagaaaaggggccggtttcccggtccccttttctgctgttctcacatcttctccagcttggccatcagtttccgccgctcgctttccggcatttcccgaacatccatcaggatatcctcgatgccttcgtgcccggagtagccgccctcgcg

SEQ ID NO: 37174 - DNA, 260 bp, Unknown
  Description of Unknown: RightRegion for integrase B11175 sequence
cgtaataaaacaagtgatatcttacaatatgtacaaaccaacatttttcagaatcagagttgacagaacattttgcggtgcaaaagttggcaaaataagtcagataatactattaatcaaaacattttttcaatgattactcgtttacactattacactaaagattttgcgcatgggagcgtttctgagccgtgccatatacttacataggtttcgcaaaacgctcccacaaacgattctacggccttacagggcataaa

SEQ ID NO: 37175 - DNA, 260 bp, Unknown
  Description of Unknown: RightRegion for integrase B11176 sequence
acgcgctttatccggagaattgacgcagatgacgacggcgcgttttttgtaacgccccgttaggcatatttgaccttggtattcccaaaggtaaattatgcccaaaagaatccccccgtcgtaagacgggggggtgttctcatttttcgagcttccgcatcacgctgttgtacacgcgctcgtttacgattttcaagctgtccatcagctcgtccatgatctcccacgccttgtccggtgaaacatctgccactgcgcgc

SEQ ID NO: 37176 - DNA, 260 bp, Unknown
  Description of Unknown: RightRegion for integrase B11177 sequence
atagaagtggacaatgaagcaagaaaggtcagcaagatagtctatcttagccgttacaaatgattctatgtaaaaaaaatattcatataaaaaggtggaaatgacttccacctatgcgtatgacagaaggaatgaaagcatgattcctaccatgaatgatgcctcagttgccaattgcgccgctgtatgacgagatttgatatttttatactttctattcctctgtttttccatttgctttatgtgtctccgattgaaaa

SEQ ID NO: 37177 - DNA, 260 bp, Unknown; identical to SEQ ID NO: 37157
  Description of Unknown: RightRegion for integrase B11178 sequence

SEQ ID NO: 37178 - DNA, 61 bp, Unknown
  Description of Unknown: RightRegion for integrase B11179 sequence
gaagaaatactaaactctgattacattaacatttataacaatcttacgagagaaaacaaaa

SEQ ID NO: 37179 - DNA, 260 bp, Unknown
  Description of Unknown: RightRegion for integrase B11180 sequence
gcgctggtggagcaggtggttgtggacagccaggcagtggcgagcgtggttcttcgcctttgaggtaacgatctgcggcaatttgcagcagtgcgctgacgggatcatcactcacttgccaccccagctgtcatatacacccccctcagccttcatagtcaccaattctccaacgaacggaactgccgcgtcctgcatctcgccgagcactatgcccagcacctcctcagcaatgtctgtaggtgattcgcacagtacct

SEQ ID NO: 37180 - DNA, 260 bp, Unknown
  Description of Unknown: RightRegion for integrase B11181 sequence
actataatagataaaattgttatagtcaatggaaatatcgaaatacagttaaagaatttttagcacttactatatgcagttcctatgacataatgttagtgctaatgccgtatttatcacgttttacaattatataattttagtgctgtcgcttatatgtcgtacatatgtctatcatatgtcgctttaagcgtctttttttatgccaaaatataatcagaaagagaggtaatgcgaatgttttctgatgaagttagaga

SEQ ID NO: 37181 - DNA, 222 bp, Unknown
  Description of Unknown: RightRegion for integrase B11182 sequence
gaaatgaaagcaaaagctaaagaaagagaattagaaaggatgagacaattatggcaaaagtaacaataataccatcaacgcttaatccactaacacaagcacctattacatcaaaacaaaaaagaagggtatgtgcttacgctcgtgtttcaacggatagcgatgaacaatacacaagttatgaagcacaagtaacttattataaaaaatatattcaagaac

SEQ ID NO: 37182 - DNA, 260 bp, Unknown; identical to SEQ ID NO: 36121
  Description of Unknown: RightRegion for integrase B11183 sequence

SEQ ID NO: 37183 - DNA, 260 bp, Unknown
  Description of Unknown: RightRegion for integrase B11184 sequence
gatcagagtagccgcttattgtcgagtgtctacagaccaagacgaacagctatcaagttatgagaatcaggtcaattattaccgtgaatacatcttaaaacatgaagattatgagttagtagacatctatgcagatgaaggcatttcagcaactaatacaaaaaaacgtgatgcttttaaccgactaatacaagattgtagagatggtaaggtggatagaattttagttaaatctattagtagatttgccagaaatacat

SEQ ID NO: 37184 - DNA, 260 bp, Unknown; identical to SEQ ID NO: 37183
  Description of Unknown: RightRegion for integrase B11185 sequence

SEQ ID NO: 37185 - DNA, 60 bp, Unknown
  Description of Unknown: RightRegion for integrase B11186 sequence
ccagctccaaactacagctatcttgaagaactattggatacagatttccggaccatgtat

SEQ ID NO: 37186 - DNA, 260 bp, Unknown
  Description of Unknown: RightRegion for integrase B11187 sequence
gaaagctggacaccggagatgcgacaggctgccgcagaaaggagcagaaaatgccaaaagtaaccgtcattccgccgtctatcaatcggacaactcggcagtccacaaccactccaactcgccgaaaagtcgctgcttacgccagagtttccacggatttcgaggaacagctcaccagctatgaggcacagatttcttactataccaattacattcaaagaaatccggattgggaatttgttaaaatatatacagatgaa

SEQ ID NO: 37187 - DNA, 260 bp, Unknown
  Description of Unknown: RightRegion for integrase B11188 sequence
gtgaaagaggtactgattgatatgagccagagggccccgatcgctgtggagtttcgtttttgaggccagccaggtaggcccggtctatagcgaggatggcctcttctagcgtcatcgtcatttcctggccctcacgtctaggtcttctgctgtgctccacagtccggcctcatcagtcaccagaaagccgtcagaagaccacctaaggccatgcccggtgcagacagttgagccatcaaagagttttcggccagcctcca

SEQ ID NO: 37188 - DNA, 260 bp, Unknown; identical to SEQ ID NO: 35549
  Description of Unknown: RightRegion for integrase B11189 sequence

SEQ ID NO: 37189 - DNA, 260 bp, Unknown
  Description of Unknown: RightRegion for integrase B11190 sequence
ttcgacaaggaccgggtgctgctccgctggcgcaccgccgaaccctctcaggaggctgcatgaccactaagaaatgtgggacatgcggagccgataagccgttgagcgagttcgattcagcgctcaatggaaatgggtacagatcactgcgcaagcactgtcgaccctgcatgaggattagggaccgccgccgattcgagaggacacaaatgctacgggaacaatcacgattgccattgcccacctatgacgacctggcg

SEQ ID NO: 37190 - DNA, 59 bp, Unknown
  Description of Unknown: RightRegion for integrase B11191 sequence
gaatttgataataaactaattgcattagaaagcaaaataagtatgatagttgacaaatt

SEQ ID NO: 37191 - DNA, 260 bp, Unknown
  Description of Unknown: RightRegion for integrase B11192 sequence
aatcagagtagccgcttattgtcgagtgtctacagatcaagacgagcagctatcaagttatgagaatcaggtcaattattaccgtgaatacatcttaaaacatgaagattatgagttagtagacatctatgcagatgaaggcatttcagcaactaatacaaaaaaacgtgatgcttttaaccgactaatacaagattgtagagatggtaaggtggatagaattttagttaaatctattagtagatttgccagaaatacat

SEQ ID NO: 37192 - DNA, 260 bp, Unknown; identical to SEQ ID NO: 35583
  Description of Unknown: RightRegion for integrase B11193 sequence

SEQ ID NO: 37193 - DNA, 260 bp, Unknown
  Description of Unknown: RightRegion for integrase B11194 sequence
ttatatacaaacggtaatatatcatgtgatattttgcgttatgtacataatgggataaattaaaagagtgcggtttccgcaatatttccatctacaaaacggggcgtttctgtccaaagcataatattaatcaaacttttccagcatgattactggtttacttgaccgtattaaagtttttgcgcaggagagcgttttcgataggggggtatataattaccctacccactttaaaatcgcccacaacgcgccacagggcc

SEQ ID NO: 37194 - DNA, 260 bp, Unknown; identical to SEQ ID NO: 36083
  Description of Unknown: RightRegion for integrase B11195 sequence

SEQ ID NO: 37195 - DNA, 260 bp, Unknown
  Description of Unknown: RightRegion for integrase B11196 sequence
gagcttctcgaacaatgcgtgttggagccatctggagagataaccgtggtgcttcgcctttaagcttccgctccagggcggacgctaacaactgcttaagacgactttcgctggggtggggagggccttccactatttctccccccaatctttaacaactccgccgtctgcaataagttttacagtctcgcccagaattggtacaccagcctcggccatttcgcaaagcacaattgataaaacctcatctgattgaattt

SEQ ID NO: 37196 - DNA, 260 bp, Unknown
  Description of Unknown: RightRegion for integrase B11197 sequence
ttatatacaaatggtaatataacatccgacattttaccttatgtatataaacggcttatttagaaaagcgtgattatcgtaacatttttggcatgaaaagcgtgataaaatcacggaaaatactattaatcaaaacaatttttccgtgattactcgtttacttgaacgtactaaagtttttgcgtagaagagcgttttcgataggggggcatataattaccctacccgccttaaaattgctcagaacgcattctacggcg

SEQ ID NO: 37197 - DNA, 260 bp, Unknown
  Description of Unknown: RightRegion for integrase B11198 sequence
aataagagtggcagcctattgtcgggtgtccaccgaccaagacgaacagctatcaagctatgagaaccaagtatcttactatcgtgattacatcttaaaacatgaagattatgagcttgtggacatctatgcggacgaaggcatttctgcaaccaataccaaaaaacgagaagcctttaaccgactgatacaggattgtagagcaggtaaggtggataggattttagttaagtccattagtcgttttgccagaaacacct

SEQ ID NO: 37198 - DNA, 61 bp, Unknown
  Description of Unknown: RightRegion for integrase B11199 sequence
tccgagcaggccacgcgcctcaagggccgcgcccgggagctggtcgaggcccagctcgtcg

SEQ ID NO: 37199 - DNA, 260 bp, Unknown
  Description of Unknown: RightRegion for integrase B11200 sequence
cagaccgtgatcgagattctgattgccagacaggctccgacggccattcgcctgaagctctgaaggcctcataccgctcgctgatggcgcgaaccacgctgccgagatcctgcacgtcgcgcctcctgtcgttgcacgcctggatggcgtagctgctccgtccatgtttgcacgccctcgacccactgttgcggctgcggatgtggatgcgacaatggcagctgtcctgctgcgaaatgctcacccatgagcgacgtgcc

SEQ ID NO: 37200 - DNA, 260 bp, Unknown
  Description of Unknown: RightRegion for integrase B11201 sequence
agccgtattttgaaacgaattgagattgacagcaacagagatatttttttggtcttcggttaaccttaatggaattaacccgatggatagtatcattaaggttatcaaaaaagaggaagatgatttctccctcatttttcatctgcacatgcagctatttttcgattagtttcatccaactccctctgtaactgaatgttgcgctcttgaagcttaagcacagcttcgattgcattatggaacacttcatcattactcag

SEQ ID NO: 37201 - DNA, 260 bp, Unknown
  Description of Unknown: RightRegion for integrase B11202 sequence
attaaagatggcagcgtactgccgagtgtcaaccgaccaagaagaacagttattaagctatgagaatcaggtcaattattacacaaattacatcagcgagaatccactctatgaatatgcagggacttatgcggatgaaggaatttcgggaaccaataccaaaaagagggatgaattcaaccgcatgattgctgattgcagggcggggaaaatagacatgattattactaagtccatttcccgatttgcaagaaatacgc

SEQ ID NO: 37202 - DNA, 260 bp, Unknown
  Description of Unknown: RightRegion for integrase B11203 sequence
gctgtcgttcggcggattgttgttgccaaacaggaacctgtggccattgacctgattctgtagccgcgtcgtacttggccaccatgctggcgatgatttctgcgacggtcatgctgcatcccccgggtgccgctccatccactccgccaccatcggcctgagctcctgcagctcgcgatagatgtagcgatcttccggatcgccgtagtccagctccagcgcatggtccacggccatggtggacaggtccagcagccgct

SEQ ID NO: 37203 - DNA, 260 bp, Unknown
  Description of Unknown: RightRegion for integrase B11204 sequence
caggtcgtggagtgcatcgagataaccaagcaggagccgagcggtctgcgcctgaagcgatagcggcgtcgtagcgagccgtgttctcgatgatgaggcgggagagcatggcgagcggaacccgagccagtgtaagccgtggctggcgttccgcaagagatcatcctaggcaagctggacttggcacacgttttgcaccccagcacaggcttttagggtgatcgcaactgaagacggcggatgacgccagaacactggga

SEQ ID NO: 37204 - DNA, 260 bp, Unknown
  Description of Unknown: RightRegion for integrase B11205 sequence
caggtcgtggagtgcatcgagataaccaagcaggagccgagcggcctgcgcctgaggcgatagcggcgtcgtagcgagccgtgttctcaaggatgaggcgagagagcatggcgaccggaacccgcgccagtgtacgccctgtattgcatagcgcaagaggcaatcttaggaaagccacgccaggcgttcgttttgcgccccagggctgactcctaacgttggtgcaaccgaagacggcggatgacgccagaacactggga

SEQ ID NO: 37205 - DNA, 260 bp, Unknown; identical to SEQ ID NO: 37204
  Description of Unknown: RightRegion for integrase B11206 sequence

SEQ ID NO: 37206 - DNA, 260 bp, Unknown
  Description of Unknown: RightRegion for integrase B11207 sequence
gggcgaattttgaaacgtatcgagatagatcacgacggaaatatttttttaattccaaattaaccttattttcacttaccattcggttactcacaataaggtaacaagaaaccccctgccgaaacagggggcattttttattcctgcgtgtctttcggaacaacgataatgtcgttctctttatggtaggcaatgttgctgatgccaagaattgcaccaaggaacatacatacggctgcgcttgtcttagccacttcctc

SEQ ID NO: 37207 - DNA, 59 bp, Unknown
  Description of Unknown: RightRegion for integrase B11208 sequence
aaagaccgatcaagaagtgaatcatggacatctgaaatgagagaaaaagcaagactaaa

SEQ ID NO: 37208 - DNA, 260 bp, Unknown
  Description of Unknown: RightRegion for integrase B11209 sequence
gatcagagtagccgcttattgtcgagtgtctacagaccaagacgaacagctatcaagttatgagaatcaggttaattattaccgtgaatacatcttaaaacatgaagattatgagttagtagacatctatgcagatgaaggaatctccgcaactaatacaaaaaaacgtgatgctttcaaccgactaatacaagattgtagagatggtaaggtggatagaattttagttaaatctattagtagatttgccagaaatacat

SEQ ID NO: 37209 - DNA, 260 bp, Unknown; identical to SEQ ID NO: 36037
  Description of Unknown: RightRegion for integrase B11210 sequence

SEQ ID NO: 37210 - DNA, 260 bp, Unknown
  Description of Unknown: RightRegion for integrase B11211 sequence
cgctttgtggagcgggtggttgtaaccaagcaggaggttgagcaggtggtccttcgtttttgagatatcggttcgcaagctcaattagcagctcgtatccctcatccatgaccttccgattttctttaggtccaagaggtggcgtagacgatacacctccccgattagatcggccacctaaatgcagatattgcatatcagcgactgctagtccttttgtcgccgtccccgccacccctggcgctgccgcttcttcccgt

SEQ ID NO: 37211 - DNA, 260 bp, Unknown
  Description of Unknown: RightRegion for integrase B11212 sequence
cgcagtctgatatccgaagtgcgtgtaaaccttgaagggcaagcgtttcagataatgtactaactatacgccacagtcatgtggcatatgattagtacatgaatctgtgcagatgccttcaaaatacaaggtataatgtatcgaccacatcgcaaaaaatcgcttaaaacgcaaataaataggtcggtttctgtaccccttgcaattactgcgtttcaagccacgaaaaatggcacctcacgcctaaacgcaaggtgcca

SEQ ID NO: 37212 - DNA, 260 bp, Unknown
  Description of Unknown: RightRegion for integrase B11213 sequence
cgaaacataataaaagctgtgcgtgttgatgaagatgcacagcctatagaggtcatttactaatcgtcatttatatacaggtattaccaccatagtacattttctcctttcccatttggggatattatagcacaaaaaaagagcctaccaatcaaggtagactcttttaatgagaggacaccgactatcacggcaggttatgcccagacctgtgatggattccacaccgattcttaatccaacatcgcaacctcaagtgt

SEQ ID NO: 37213 - DNA, 59 bp, Unknown
  Description of Unknown: RightRegion for integrase B11214 sequence
ctcgaagatggtgtttacagtaaggaaaccttcctgcagcgtcaatccgcaatcagcca

SEQ ID NO: 37214 - DNA, 260 bp, Unknown
  Description of Unknown: RightRegion for integrase B11215 sequence
agcatcgttatcaatgacaatggagagcagttggacgtgaccctcaagaaaggactcgaataagatgaaacaagaatcaagacaagacacgatatcgctgaacacgctccggcgcaccagaaaggaacccgagccgcaggttcaggtggaactaccaaacattcatgcaaaatcagcgccgggtatggtggttccccaggcaaattgcgatttttccatccccatcatcttcgagcgcaatgaggagaatgttcgtattg

SEQ ID NO: 37215 - DNA, 260 bp, Unknown
  Description of Unknown: RightRegion for integrase B11216 sequence
gagttcgtggcttccatcgtgtggctgggcggcctggagagcctggagatcacgctgcgctagggcgcgggcgatgacttgacgaagggcggtgcgtgcgtccatcaggctgcgtaagcgggacagtggcgggcgaacaggccctttgatcggctggcttccgggtaacccaggccgcatttgtgaacccaatggacgcaggttgcgcagttcagggtccgttgccggttgcggtagttgcggttgtattcccgctgccg

SEQ ID NO: 37216 - DNA, 260 bp, Unknown
  Description of Unknown: RightRegion for integrase B11217 sequence
gccctcgtggggaagatcaccccggagggagaagggtatcatgtcgaccttgttttaccatgagtaattaaatccacctatttgtttcgttatggaaaaatgagggaaaacgtgaactccgtcttttcggaataatacgaagtgtaaagaacgcagaaaaacggtctttttcgtggtttcggaacgtttgaagcctgattacacgtttactctctttgactaaagatttttcgcccagtcgctttttatttcttcgccaa

SEQ ID NO: 37217 - DNA, 260 bp, Unknown
  Description of Unknown: RightRegion for integrase B11218 sequence
gaaagctggacggacgaaatgcggcaaaaggctgccgagcaaacaagaaagaggtatcaataatgggaaaagttacagttatacccgctacaagagattttcatacgggtgtggttaaaaatagcatttacagaaaacgagtggcggcttatgcgagagtttctaccgaccacgaagagcaacgcacatcctatgaggcacaggtggactattacaccaaatacatccaaggcagagccgattgggagttcgttagggtt

SEQ ID NO: 37218 - DNA, 61 bp, Unknown
  Description of Unknown: RightRegion for integrase B11219 sequence
ggcatcttcaacgccgctacaaagtcccgcatggatgaactggacgcgcagaaagccgccc

SEQ ID NO: 37219 - DNA, 260 bp, Unknown
  Description of Unknown: RightRegion for integrase B11220 sequence
gagttcgtcaacgaggtcgtctatgtcggggatcccgacacggtcgaagtccggctgcgctagggctcgagccgcgattctccgcagggcatctctggcgttcaaggcagcccaggcgtcgacggccactgtacgccgtgtcttgcgctttgcaagccttaatcctaggcgggctcgggagggaacggatcgcctggtgactgcacgctgattagcgttgcgccaactgaagagccgtgatggtgcccgaacactgggat

SEQ ID NO: 37220 - DNA, 260 bp, Unknown
  Description of Unknown: RightRegion for integrase B11221 sequence
gtgcgtgccctacgtgatcgagttccaacacagtcacttgtgcgaatcgccaagactaattagactgcgatccacactcccgcaagaggtagcaatagtgaagaacaaggaattcactctggacctgggtgagccggttcctgtcagcgagttgatcgctgttcctgcaacacgccagccttctccccgtgacctggctcttgatgatctggtcgcacgggtagcaactgacgacttcaaagacaaggccatcagttgga

SEQ ID NO: 37221 - DNA, 59 bp, Unknown
  Description of Unknown: RightRegion for integrase B11222 sequence
ggagttatcatgaatcaagttctcgaccgcatcagtatttcagaagctggacaaattgt

SEQ ID NO: 37222 - DNA, 260 bp, Unknown
  Description of Unknown: RightRegion for integrase B11223 sequence
cgttcaatcatcaaagagatcaaattttatcctgataggcatattgagattatttttttgtgataaattactgtggaacgggttagatcggtctcggtgttccttgttactaagtaaaaacatagcttaagccctgaaaatataggattccttgttttcagggcttttaaaaattcaacaaatattcagcttttcaggcatcaattttttgtgctacttcaacatggtacaacgtggcgcaatcgtccattgacggcagt

SEQ ID NO: 37223 - DNA, 260 bp, Unknown
  Description of Unknown: RightRegion for integrase B11224 sequence
caattcgtcagcgaacttgtctggcccggaggactggagagcctggagatcacgctgcgctaaggcgcgctctgcgatgcgctcaagcgcctcctgcccagtcatgcgcgacctgtcgtgcgttgctgcgcgaagtatgccacagctttctcttcgcaagctgcaatcctaggaagtcgggatcggtcgctcagatttcgccctgcatcgctctgcctacggtgaggtcacgacggaccatcgccgatgacgccggaaca

SEQ ID NO: 37224 - DNA, 260 bp, Unknown; identical to SEQ ID NO: 36098
  Description of Unknown: RightRegion for integrase B11225 sequence

SEQ ID NO: 37225 - DNA, 260 bp, Unknown
  Description of Unknown: RightRegion for integrase B11226 sequence
cgaagtctgatatcagaagtgcgtgtaacccttgaaggacaagcgtttcagataatgtactaactatacgccacagtcgtgaagcatactgttagtacatgaatcggtgcagatgccttcaaaatacaaggtataatgtatcgaccacattgcaaaaaatcgcttaaaacgtaaataaacggctcggtttctgtaccccttgcaattactgcgtttcaagacacgaaaaatggcacctcacgccaaaacgcaaggtgcca

SEQ ID NO: 37226 - DNA, 260 bp, Unknown
  Description of Unknown: RightRegion for integrase B11227 sequence
ctaattaaaaccatagaatttactaatgaatccaagcataaaccaaaagtgatttttttataggtttgtgtcactttattttactatagcctgagctatatttaattaaagggacataaaaaagagggccagcaccaaccgctgacccttttcttatttcttatatttcttgcaccatggcaggcacttatttccaaactttccattctgtgtggttccaatcagatcctgcagcttcttgactgccttgaccgtctcag

SEQ ID NO: 37227 - DNA, 260 bp, Unknown; identical to SEQ ID NO: 37183
  Description of Unknown: RightRegion for integrase B11228 sequence

SEQ ID NO: 37228 - DNA, 260 bp, Unknown; identical to SEQ ID NO: 37191
  Description of Unknown: RightRegion for integrase B11229 sequence

SEQ ID NO: 37229 - DNA, 260 bp, Unknown
  Description of Unknown: RightRegion for integrase B11230 sequence
aatcagagtagccgcttattgtcgagtgtctacagaccaagacgaacagctatcaagttatgagaatcaggttaattattaccgtgaatacatcttaaaacataaagattatgagttagtagacatctatgcagatgaagggatctccgcaactaatacaaaaaaacgtgatgcttttaaccgcctaatacaagattgtagaggtggtaaggtggatagaattttagttaaatctattagtagatttgccagaaatacat

SEQ ID NO: 37230 - DNA, 260 bp, Unknown; identical to SEQ ID NO: 37208
  Description of Unknown: RightRegion for integrase B11231 sequence

SEQ ID NO: 37231 - DNA, 260 bp, Unknown; identical to SEQ ID NO: 37183
  Description of Unknown: RightRegion for integrase B11232 sequence

SEQ ID NO: 37232 - DNA, 61 bp, Unknown
  Description of Unknown: RightRegion for integrase B11233 sequence
gatttagataaatttgatggagttatcatgaatcaagttctcgaccacatcagtatttcag

SEQ ID NO: 37233 - DNA, 260 bp, Unknown
  Description of Unknown: RightRegion for integrase B11234 sequence
cgaatcatcaaaaaagcaaccgtctcaaaggacggcattgattatacgctcagttatacataacgacataaacagcactgcttctgttgtttcgtaaaatgaacataaattaaaaatccgtttttgcaaaacattttcggcatcaaatcgttcacttatcgcaaatactacgcactttttataacattttgccgttgattacacggatacactattacactaaagattttgcgtgtgagagcgttttgaaacctcgccat

SEQ ID NO: 37234 - DNA, 260 bp, Unknown; identical to SEQ ID NO: 37197
  Description of Unknown: RightRegion for integrase B11235 sequence

SEQ ID NO: 37235 - DNA, 260 bp, Unknown
  Description of Unknown: RightRegion for integrase B11236 sequence
aataagagtggcagcctattgtcgggtgtccaccgaccaagacgaacagctatcaagctatgagaaccaagtatcttactatcgtgattacatcttaaaacatgaagattatgagcttgtggacatctatgcggacgaaggcatttctgcaaccaataccaaaaaacgagaagcttttaaccgactgatacaggattgtagagcaggtaaggtggataggattttagttaagtccattagtcgttttgccagaaacacct

SEQ ID NO: 37236 - DNA, 260 bp, Unknown
  Description of Unknown: RightRegion for integrase B11237 sequence
gcatcccccaaagcagaatatgaattatcggacgattgtccgtacacgagaaaggaagattgacatggcaagacaagtcgtacacattcccgcacagaggaatattgcaaacagggctgttgcccgtaacaccaaactccgagtggcagcctactgccgagtttccacggagcaggatgaacagctgaacagctttgaaaaccaggtgacctactacacagagttcatcaccagaaaccccaattatgaactggctggca

SEQ ID NO: 37237 - DNA, 59 bp, Unknown; identical to SEQ ID NO: 36264
  Description of Unknown: RightRegion for integrase B11238 sequence

SEQ ID NO: 37238 - DNA, 61 bp, Unknown; identical to SEQ ID NO: 37232
  Description of Unknown: RightRegion for integrase B11239 sequence

SEQ ID NO: 37239 - DNA, 60 bp, Unknown
  Description of Unknown: RightRegion for integrase B11240 sequence
ggagagcgactccttgacctcaattcccaaaaggctgacctacagaagcagatcagccgg

SEQ ID NO: 37240 - DNA, 59 bp, Unknown
  Description of Unknown: RightRegion for integrase B11241 sequence
acaacttttacgctgcctcggaagttgatgaagctagtttacacaaggcctgaactaag

SEQ ID NO: 37241 - DNA, 260 bp, Unknown; identical to SEQ ID NO: 36902
  Description of Unknown: RightRegion for integrase B11242 sequence

SEQ ID NO: 37242 - DNA, 60 bp, Unknown
  Description of Unknown: RightRegion for integrase B11243 sequence
aacggattagagcaagaaatagacacaaatactatggatataattaataaagaattagaa

SEQ ID NO: 37243 - DNA, 260 bp, Unknown
  Description of Unknown: RightRegion for integrase B11244 sequence
aatccgaatggcggcctactgccgagtatccaccgaccaagacgaacagctatcaagctatgagaaccaggttcggtattacaaagagtatattcagcagaatcctctctacgagttggttgatatttatgcggatgaggggatttcaggaaccaataccaagaaacgcacagagtttaataggttgatagctgactgccgaaaaggcaaagtggatagaatcattgtgaaatccatcagccgtttttccagaaacacgc

SEQ ID NO: 37244 - DNA, 260 bp, Unknown
  Description of Unknown: RightRegion for integrase B11245 sequence
aatccgaatggcggcctactgccgagtatccaccgaccaagacgaacagctatcaagctatgagaaccaggttcggtattataaagagtttattaggcagaatcctctctacgagttggttgatatttatgcggatgaggggatttcaggaactaataccaagaaacgcacagagtttaatcggttgatagctgactgccgaaaaggcaaagtggatagaatcattgtgaaatcgattagccgtttttccagaaacacgc

SEQ ID NO: 37245 - DNA, 260 bp, Unknown
  Description of Unknown: RightRegion for integrase B11246 sequence
aatccgaatggcggcctactgccgagtatccaccgaccaagacgaacagctatcaagctatgagaaccaggttcggtattacaaagagtatattcagcagaatcctctctacgagttggttgatatttatgcggatgaggggatttcaggaactaataccaagaaacgcacagagtttaatcggttgatagctgactgccggaaaggcaaagtagatagaatcattgtgaagtctatcagccgtttttctaggaacacgc

SEQ ID NO: 37246 - DNA, 260 bp, Unknown
  Description of Unknown: RightRegion for integrase B11247 sequence
agcaaattggtaaaaagaatcgtcattgacgataaaaaaatctcctttgagttgtatgcgtagtattacaactcgaaacaagaccgatgtctcatttgtttttgcaaaacaaaaaagggtcgccccgaagggcggcccttttacgattctatccgtatttcttttttcgtgcctttgagcgtcatgatgtgtcttgtgttcgccgcggggagaagcatcttcctcacggcataacctccgtatgacatccacgagctgac

SEQ ID NO: 37247 - DNA, 61 bp, Unknown
  Description of Unknown: RightRegion for integrase B11248 sequence
ctcgacccggacctggccagcacgcggggctcgattaaagaaaagtaccgggcggcgacgg

SEQ ID NO: 37248 - DNA, 260 bp, Unknown
  Description of Unknown: RightRegion for integrase B11249 sequence
aatccgaatggcggcctattgccgagtgtccaccgaccaagacgaacagctatcaagttatgagaaccaggttcggtattatcaagactatattcgccagaatcctctctaccagttggttgatatatacgcggatgaggggatttcaggaaccaataccaagaaacgaacagggtttaatcggttgatagcagactgccgaaaaggtaaagtggatagaattatagtgaagtctatcagccgtttttccagaaacacgc

SEQ ID NO: 37249 - DNA, 260 bp, Unknown
  Description of Unknown: RightRegion for integrase B11250 sequence
acgttgataaaatccatcacacccaccgaagagggcttcgattttgccctaaattatacataaagtaatatgactgatgtaatcttgccttttgtataaatgggcataaatcggaaatcgtgaattagggaacattttaagggggtaaaagtgtgtattttcaccagaagttacacctttactgcatttcgtggagatgattacacgtttacactcatgaactaaagaaatcgcgttttattcttcagacgtatatttac

SEQ ID NO: 37250 - DNA, 260 bp, Unknown
  Description of Unknown: RightRegion for integrase B11251 sequence
acggcgaagcaggcgaggaagctcctgcggcaggcggcacgccagcaggagcagaagggctgaggggttcagcggctactgtttatgggcgtctcctacggagcagccgccgctcagcggcacgcggcgacgagcctgtagccctgcagctcgccccgctccttcaactgccgcagaatttcgagggctttgcggtcgtaaacgacgagcgtcctgcccttcttccgcacctgagctttcgagaacgtccaagcgtaagg

SEQ ID NO: 37251 - DNA, 260 bp, Unknown; identical to SEQ ID NO: 36902
  Description of Unknown: RightRegion for integrase B11252 sequence

SEQ ID NO: 37252 - DNA, 260 bp, Unknown
  Description of Unknown: RightRegion for integrase B11253 sequence
atgaccggtccttcatcctctctgccatctccggtatggaatccgagcgtgacaagctcttaaagcaaatcgaccgcctccatgacctggttgagcagggcgtctacaccatcgaacagtataacgaacgctacgtcaaactccacctgcgcctccaggaagtcaacgcctccctggccaccgagcagcagcgcctttcctccctccccgcctactgcacaaaagcagagctggccccggccatcatccgtctgcttgac

SEQ ID NO: 37253 - DNA, 260 bp, Unknown; identical to SEQ ID NO: 36210
  Description of Unknown: RightRegion for integrase B11254 sequence

SEQ ID NO: 37254 - DNA, 60 bp, Unknown
  Description of Unknown: RightRegion for integrase B11255 sequence
gatgtgcgccgaaaaatcaacaatatcattgaatccattgaaaacggtactgccagctct

SEQ ID NO: 37255 - DNA, 260 bp, Unknown
  Description of Unknown: RightRegion for integrase B11256 sequence
gaagctaaagcgacctatagaaatggagaagaaaaacacgtcatcattcagaaaggacggtagacatgaaaaaagttatcacgatagaaccagccaaacaagtcacccataaggttgacctgcccagctttaccaaacgacgagtggcaggctatgccagggtatccactgaccatgaagatcagacaacttcctacgaagctcagatgacatactacacagactacatcaacagtcgctcagattgggaatttgtcaag

SEQ ID NO: 37256 - DNA, 62 bp, Unknown; identical to SEQ ID NO: 36434
  Description of Unknown: RightRegion for integrase B11257 sequence

SEQ ID NO: 37257 - DNA, 260 bp, Unknown; identical to SEQ ID NO: 35981
  Description of Unknown: RightRegion for integrase B11258 sequence

SEQ ID NO: 37258 - DNA, 260 bp, Unknown
  Description of Unknown: RightRegion for integrase C1 sequence
cttgtttaccaggtcgatcccgtaacttcttcatcacatagcggacgaggtgcagtatgagcctaagcccttgtcgcgtggccgccgtggccgggctggcaggattgtggtgccatagtgccgggccatatcctggtacgtacggttgaggccgggatcatagcggtctgggttggtcacagccgccttgagattgtcgcagaccgtgatggtcgccactccgccgaaggcggcgaacatgccgacatggcagccgatcc

SEQ ID NO: 37259 - DNA, 260 bp, Unknown
  Description of Unknown: RightRegion for integrase C2 sequence
gagcccgttccgccgtgcgccattggagcaggccgacacagaggagagcagtatggataacgatctagcagcgtatggaacagcagctggccgccattctgggagaacggcaggtagccaagctcgtccagcaccaccagatcgacgcgggtcagctggtcggcgagcttgccggcctgaccggcccgagcctcgccctccagccggttcaccaggtcgatgacgttgaagaaccgggcgcgcgcgccgcggcgtacgca

SEQ ID NO: 37260 - DNA, 260 bp, Unknown
  Description of Unknown: RightRegion for integrase C3 sequence
aaaggcctatggatcaagacgatagaccaaaatcccagcctcttcgaacagataccgtgaaccagggggtattatgacaatggatccaacgtgtcgtcgatgtcgagcacaatccgcttcggcacctgccggaaggaggcgcagtaaaggtcgatcatcgctcgccccatggcgaccagctcccgcacgccgggcaggttctccagcctgcacatcgtcgactgggaggccagatcccgacccgacggcagcgcatcctg

SEQ ID NO: 37261 - DNA, 260 bp, Unknown; identical to SEQ ID NO: 37260
  Description of Unknown: RightRegion for integrase C4 sequence

SEQ ID NO: 37262 - DNA, 260 bp, Unknown
  Description of Unknown: RightRegion for integrase C5 sequence
aaaggtttatggatcaagaccatagatcacgatcccaccctcttcgaacacacttcatgaaccagggggcattatgacaatggatccaagcagcccttgatgtctccctcgatgacccacggatatggcatcccgtgcctccgggtatccccgccgcgtttatgcgactgagcagcccgtcggatatgctccaaggcgccgtgcgtgctccgtccgggcctgaacccataggaaacatgccagaactgcgcctcgaagat

SEQ ID NO: 37263 - DNA, 260 bp, Unknown
  Description of Unknown: RightRegion for integrase C6 sequence
aaaggcctatggatcaagacgatagacaaaaatcccagcctcttcgaacagataccgtgaaccagggggtattatgacaatggatccaaggtgtcgtcaatgtcgagtacgatccgcttcggcacctgccggaacgaggcgcaatagagatcgaccatcgcccgccccatcgcaaccagctcccgcacgccgggcaggttctccagccggcacagcgtcgattgcgacgccagatcccgacccgacggcagcgcatcctg

SEQ ID NO: 37264 - DNA, 260 bp, Unknown
  Description of Unknown: RightRegion for integrase C7 sequence
cagtgggagtggcgcctgaagatcgccccccaatcaagccaatccggcttgagccgttgacggaaaccggtaggaaggagagcagtatggataacgcttcccgacgctaccgacggagggctcgacaccggcgtcggtcaggcgctcggtatacttgatggcaacgtattgcgagccgcggtcggagtgatggatgaggccgctgccctttgccggtcggcggtcgtggagcgcttgctccaaggcgtccagcacaaaat

SEQ ID NO: 37265 - DNA, 260 bp, Unknown
  Description of Unknown: RightRegion for integrase C8 sequence
gagatcctcaggcaacgctggcaaggggaaacacccagcattgcttgtcctcctgactagacggtttgaccggtataaactcaaatttttgactggagaagacccatggcaaagcacacaccttcgattccaccacctcagcatccgcctgaagatgactatgggggtattgaggctggagtatctcaatgcgccagcgtagtcggtagtcggcgagggccgtctgaggggcgtggtgggtggcgagaatcaggagttcg

SEQ ID NO: 37266 - DNA, 260 bp, Unknown
  Description of Unknown: RightRegion for integrase C9 sequence
tatcgacaaatgcaaaccgagccaagaacatcaactggcgaggaaagaggtgtagtatgaacgccgatcgttgtagaacaggcaggcaccctggccgtcatgccagatcaccttaatcagcccgccttggcgaccgcggaaacagaataaatgaccgctgtgcggatctcgcttcaacgtctcctgcaccatcaatgccagacctggaaagcccttgcgcatatccgtgtagccgctggcaagccacaccttcacgccgc

SEQ ID NO: 37267 - DNA, 260 bp, Unknown
  Description of Unknown: RightRegion for integrase C10 sequence
atcgatcaacttcaacgccgactgcaacggaccaggcgatcaaggaaaggtgcatcatgaagcattcgcggatcccacctacgccgatgccatcctcgaccgcctcgttcacaacgctcaccggctcgaactcaacggcgaatccatgcgcagatccatcatctccgctgccgcttgaccgaaccgcaaatgcagtgacatcttccccgacgatcaggtgctccacctgcgcgcgatcagatcggaacgctgcgcggcat

SEQ ID NO: 37268 - DNA, 260 bp, Unknown
  Description of Unknown: RightRegion for integrase C11 sequence
atcgatcaacttcaacgccgactgcaacggaccaggcgatcaaggaaaggtgcatcatgaagcattcgcggacaaagccatgacgttggccgccatcgacagactggttcatcacgcgacgatcttcgaaatgaatgtcgagagctacaggcgcaaaaccgcaatatcccgtttgacggaaaacagcgatggcacgccggcaacgctggcctcggccctcgctgattgacgcgccgcgacaaacaaacgtcagcatagat

SEQ ID NO: 37269 - DNA, 260 bp, Unknown
  Description of Unknown: RightRegion for integrase C12 sequence
cggccacagatttatgaatattatcaatatgataaggttgtccgattgcccggactctaacagagggaagcattatgaaacgcgctggcgcgaccggatgaaactcttgttctttgaccggtccggcttcgtgctggttctaaagcggctgaccgaggacaagttccggtggccgcgccgggagacggcggtggttacgctgacgaccgagcagctccattggattctcgacggcatcgacatcgacgcaatggtgcgcc

SEQ ID NO: 37270 - DNA, 260 bp, Unknown
  Description of Unknown: RightRegion for integrase C13 sequence
tatggtggccgtcaacccagattaattgtcgctcaacgactccaacaaggtgcatcgtgatgtctgctccttgtcccgcgggcgtcgcggccgcgtcggcaagacggcgctgccataatgggccgccatcccgcaatacgtccggttgacctggggatcgaagtggcaggccttgatgatcgctaccttggcattgtcgggaaccagcaaggctggcgcaccgccaaagtactccagcgccaggatatggcattcaatcc

SEQ ID NO: 37271 - DNA, 260 bp, Unknown
  Description of Unknown: RightRegion for integrase C14 sequence
cgcaaagctacacaaccaaccttcatcgccgctccaactaccgaacaaggtgcaatgtgaaacctactccttatcctgcgggcgataaacgcgtgcaggcagaaatgaggtgccgtagtgacgcgcgaagtccagcacggtgtcgcccgcgcgcggctcgtaacggtcggggtcggcgatcatcgcgcgcgggttgtccggcacgatcagttgtggaacgccgccgtagaaggtcagcgcgcgggtgataccactcagcc

SEQ ID NO: 37272 - DNA, 260 bp, Unknown
  Description of Unknown: RightRegion for integrase C15 sequence
gccgttcccgcccgccgtgcctcaattaccgtgccatcaaccgaacaggactcattatgaaaccttcgccttatccttcggccgcttcggtcgcgccggcagaacgccgacaccgtagtgggaagccatcatgccgaagctacggttgatctccggatcgtaaaagcttgcgcggttcacaccggacttcagattgtcgggaacaatcaggcgcgggacgccgccaaaaaagcggaacaagcgcacatgcgagccaatcc

SEQ ID NO: 37273 - DNA, 260 bp, Unknown
  Description of Unknown: RightRegion for integrase C16 sequence
aacgatgccgaaggacaaatccctatgtttatcgaggtttcggaaggaggtgcacaatgaacgccccattgcgaacggcctgatgtcgcgctcgatgacattgttatcaacgggggatcgcccgtcgtctacgtagcggatcaggtactgccattgcctgcgacagtagccgaccgcctcgccgaacagactcttcggcaagaccttcggcgccagctcgtcaagccatgccttgaaggcgctcagcaatggcacgctgt

SEQ ID NO: 37274 - DNA, 260 bp, Unknown
  Description of Unknown: RightRegion for integrase C17 sequence
cgggactgggtgcgcacttcagggcatcttcgggggcaacattcccacactcaactgtgagaggtgcattatgagatcaccgtcggtatgccgagattgcggaactcccccggtttgccgactttcgggatcgagacctgccggaccggttgcggctgataggtccgcgcacgcagttctgcctgcagacggtccagatgctggtccgcctgttcggcaaagtctgccacgctgattccatcgacaccgccactgccccg

SEQ ID NO: 37275 - DNA, 260 bp, Unknown
  Description of Unknown: RightRegion for integrase C18 sequence
cgtcgtctgagacggccgccgtccagcaatcctcggcaaaaaacccttgaacttcaatgacatggaaaggtgagcattatgaagcaggctcggtttggcctgtcagaatcaagttctcgtttgccttcagccatgctccttgcgctagggataagacgttgcggcgatcaagaccgcggtgggtgctgaagtcgatgtcttcgatcgaagcattggcaaaccgcagctttgccgttgccagtcgattggtcagccgcttg

SEQ ID NO: 37276 - DNA, 260 bp, Unknown
  Description of Unknown: RightRegion for integrase C19 sequence
aaggcgcgcccgtgtcgcatcgccgacgcggagacgcttccaatgtttacagatacttaaagaaggagtgcgcgatgactcaggcccgccaattggacgcagggcccgctcggcggcgttgttatccatggcgacacgaccgtcttcgacgaataggcagaacgaggaccaacggctcaggccatatcggaaagcttgagccagatcgcccttgcccggaatacgggccagttgcgcttcagcccagacgcggaatgctt

SEQ ID NO: 37277 - DNA, 260 bp, Unknown
  Description of Unknown: RightRegion for integrase C20 sequence
aaggcgcgcccgtgtcgcatcgccgacgcggagacgcttccaatgtttacagatacttaaagaaggagtgcgcaatgactcaggcccgccaatggggcgcagggcccgttcggcggcgttgttatccatggcgacgcgaccgtcttcgaggaataggcagaatgagtgccagcggctcaggccgtaacggaaggcgctcgccagatcgcccttgcccggaatacgggtcagttgcgcttcagcccagacgcgcaaggctt

SEQ ID NO: 37278 - DNA, 260 bp, Unknown
  Description of Unknown: RightRegion for integrase C21 sequence
ccacgtctcaacgggccgtcatcatcaaatccggagcaaaagacctttgtctttcagtaacgtagcgagatgggcattatgacgtgggaccagggccgctgatcgtaaccgcgcttgaggcgatggctccaccagcagagacgttccgctctgggcgcgatttcgcagcctggatcgggctgacgccgatccagcgttcgaccggcggcaaggagcgcctcggacgaacgtcgcggatgggagagcgaacgctgcgacgc

SEQ ID NO: 37279 - DNA, 260 bp, Unknown
  Description of Unknown: RightRegion for integrase C22 sequence
aagggcagcccgtgtcgcatcgccgacgcggagacgcttccaatgtttacagacacttaaagaaggagtgcataatgactcaggtctggcaagtggacgcatggctcgttcagctatgttgttatcgatttcgacacggccatcgtcgatgtaaacgctcaacgctgcccatcgagagagggcatatcgcattgcctcggccagcttctgcttctgcggcaacgtcgaaagcgtgtcttcgatccagaccttcagttctt

SEQ ID NO: 37280 - DNA, 260 bp, Unknown
  Description of Unknown: RightRegion for integrase C23 sequence
aggagcggacacagtccattatcacaatcacaggatcagcagatccagctttttcaataacatagcgaggtgtgcattatgtcgtgggatcggtcgggccgaacagaagcaggttcgcgcccttctcaagccagctgtcgccggcggtgatggccatcacctgggccttggagatcattggaacggcttcgaactcgaacgtgtcgagggtcttgcccggcaggaggcgcgcctcggcgaggtgcctttcgatgcgtcgc

SEQ ID NO: 37281 - DNA, 260 bp, Unknown
  Description of Unknown: RightRegion for integrase C24 sequence
cctcgccaccccgcgggatcgcctccagatcaggaaaatctattcctttcgatgacataggaagatgggagttatgaaacaggattgtaatcgctgcaccagtttgaaagcgctgaccgagcatacgccagtgacgagaagagcgtttcattcaggaactcgtctcgcagccgcccattgaagctttcgatgaaggcgttctggatcggcttgccgggcgcgatgtagtgccattccaccttggtccgatccgtccattg

SEQ ID NO: 37282 - DNA, 260 bp, Unknown
  Description of Unknown: RightRegion for integrase C25 sequence
ccgaggcaccccataggatcgcctccaaatcaggaaagcttattctcttcaataacatagaaagatgggcgttatgaaacaggattgtaatcgtccgcccattccgcaatggcgctgcgggcatggtcgaggccgaagaacaggctttcattgagcagctcgtcgcgcatgcggccgttgaaactctcgacatagccgttctgcattggccttccctgtgcaatgtagtgccactcgaccttgtgatcttttgaccaggc

SEQ ID NO: 37283 - DNA, 260 bp, Unknown
  Description of Unknown: RightRegion for integrase C26 sequence
ccgaggcaccccataggatcgcctccaaatcaggaaagcttattctcttcaataacatagaaagatgggcgttatgaaacaggattgtaatcgtccgcccattccgcaatggcgctgcgggcatggtcgaggccgaagaacaaactttcattgagcagctcgtcgcgcatgcggccgttgaaactctcgacatagccgttctgcattggccttcccggtgcaatgtagtgccactcgaccttgtgatcttttgaccaggc

SEQ ID NO: 37284 - DNA, 260 bp, Unknown
  Description of Unknown: RightRegion for integrase C27 sequence
cctcgacaccccacaggatcgcatccagatcaggaaaacttattcccttcaacaacatagaaagatgggcgttatgaaacaggattgtagtctctgcgccaatcctccatcttttcgcgggcatccgcaagggtcaggaaccaatgctgggtcagacattcggctcggaagcggccgttgaatgcttcgattaaggcattgtccgtcggctttcccggatgtgagaagtccaaggtcacacccttggcataggcccaaag

SEQ ID NO: 37285 - DNA, 260 bp, Unknown
  Description of Unknown: RightRegion for integrase C28 sequence
gtgccgtcacgccgtccggtaacacaggatccggatcagcggacccttgactttcaatgacatagcgaggtgggcattatgacgcgagagcggttccgccgacgaacacggcgttgcgctgggtttccaggaagccgccgtcgtgcaggtcgcacaccagcgcttcgttcaccgggctggccgcgaagtcgaactcggcaagcgtcctggccagcggcagcctggccgcgccgagctggtagcggatcgagcgcgccttc

SEQ ID NO: 37286 - DNA, 260 bp, Unknown
  Description of Unknown: RightRegion for integrase C29 sequence
ggaattcgcgcgaccacttcaggtttcgagttcgagatcgcgagcacgaaggcgtcctgaccagggcaaacagagggccccccgccttgcggcagggggccttcgtcatttccggcgccactggatggggatcgggggctgtcgatcgaagtgatcgacgcacctgtcagtgaggcggctcatcgctggcttcccgcacaggtagccgtacgcccactgctcggcgatgctcccatcctctcgcttgaaccggatcttct

SEQ ID NO: 37287 - DNA, 260 bp, Unknown
  Description of Unknown: RightRegion for integrase C30 sequence
gggattcgcggaaccacttcaggtttcgagttcgagatcgccagctccaagacggcctgaccaggcagaacgcaccaacaagcaagcccccgtccgtaagggcgggggcttcttgctgtctaccgttggagggtgtcctcccagcggacccggcgaaggcccctcgggtggcacgggcaggcgcaacggtgctggtggtagaccactccctgcaccgtcatgtcgaggttcccgtcgcagtactcatgcagctcgatgtc

SEQ ID NO: 37288 - DNA, 260 bp, Unknown
  Description of Unknown: RightRegion for integrase C31 sequence
gggattcgcgcgaccgcttcaggtttcgagttcgagatcggcagcgcaaagaccgcctgacctgcaacaacaagaagcccccgccatgtggcgggggctttctgctgtctactggcacctactcctcggccgcgggggtctcgttcacgtaggagcccatgcccacctcggtacggaccgagccgtcggcgcggagagcccgaatgaccttctgccccgtgaccgtcgacatgccgaactcttcagagagtgcgagcacc

SEQ ID NO: 37289 - DNA, 260 bp, Unknown
  Description of Unknown: RightRegion for integrase C32 sequence
acgatccagtgggtacacacgcagaaataccgtaaggccatggccgaggctgtggcctaggtcactcgaacggcctagtcagggtcgcccctcatgcttcgcagaccagcggaggaggggcggcccttttttcgtcaccactccataccccctctgacctgggacaatgttacgagtgttgattctgaacatgaaactaggtcaccccttgagaaacccaatggggtccggaaaactctctcccgatcagcactcgacac

SEQ ID NO: 37290 - DNA, 60 bp, Unknown
  Description of Unknown: RightRegion for integrase C33 sequence
atcacagctttatacgagcgactctcaaaggatgatgaggtgcagggagagtcaaacagt

SEQ ID NO: 37291 - DNA, 260 bp, Unknown
  Description of Unknown: RightRegion for integrase C34 sequence
acacgtggagtgtgttgctctgcttgtaaaagcttagaaacctttgaacgaaagggataatgaaagccttgattgcaaggctttttgctttatggtgggtaagtatcagagtgagaaaatttttggaatgagtagaagtgatagctagaaattatcagtttctatttccatttaccctgtgggtacgtgtttgtttccattgacaaggagtttgtgggaatagaaatgtacccaccttgtttgaatcaagtgaagtgtag

SEQ ID NO: 37292 - DNA, 260 bp, Unknown
  Description of Unknown: RightRegion for integrase C35 sequence
ctgcgcttcgggctggctaagaacgccccagcgaaaaccacttccgaaactctcgtttgatcgcacgtatttatcggaggtgcacctgtgagcacctctgtaactcttcggggtggctccgctgcccctaatcgctccaagctcgtcaccgggccggagcaattacctctcttttctctccccacgtgtcgccgcgaccgccgcatgcacctggctcgtctgttctggcacgtgaactatctggatgcctgccacggctg

SEQ ID NO: 37293 - DNA, 260 bp, Unknown
  Description of Unknown: RightRegion for integrase C36 sequence
tgtattgaactgtccgcaaaaaatgaccgactgacattgtccagcgaaatggacgactaattcgacaaggaaacatgcaccaggaggtagatatttatcactatattactaaagggagcttcgacaattacctatggcagacacaggagaataagctaaagtatatcacccagataatgacctcaaaagatcctgtgagatcagctgaagacattgatgaacaaaccatgactgcctcagactttaaggccttggcaact

SEQ ID NO: 37294 - DNA, 260 bp, Unknown
  Description of Unknown: RightRegion for integrase C37 sequence
cctcaaaacagtgacgaggataaaaaaatgtattctcaaggaccagacaacacacgttgaggtagttggtttgctggtaaaatcctagaaacggttgaacgaaagcattattaaaagccttggagacaaggctttttactttggggtgggaaagtatcaaagtgactacctcagttgaggtaattgaagtactagggactaattcgttaatttatttccatagacgcatggaggggatattttaagaaacgtttgaggaa

SEQ ID NO: 37295 - DNA, 260 bp, Unknown
  Description of Unknown: RightRegion for integrase C38 sequence
cagcgcggcttcgtcattggggaaatgccccctggcccggaccgcccggcgcagctttgagttcaacgcttcaatggcattggtcgtgtaaaggatgcgccggacctcgcgcgggaaggcaaagaaggggatgacctcctgccacgcccgccgccaggccttgccgatggccgcgtatttttcgccccaaggcccggtctcaaaggcggtcagggccatctcggcggccttgtcgtcgacagcgtcgtagaccgtcttca

SEQ ID NO: 37296 - DNA, 260 bp, Unknown
  Description of Unknown: RightRegion for integrase C39 sequence
gaaattagtttggacaataatgagcacgtggagtgtgtcgctctgcttgtaaagaactagaaaactttgaacgaagggattccatagagaattactcattttctctaattagataaaatgtaacctctgttattcttgtataactactttacaagttttgaaaaattggtatgatctgcatcatttatatatttgtatgtttatgttcgagagaaatctatacgcatagttaagaaagaaaagagccgcgaaagcgactc

SEQ ID NO: 37297 - DNA, 260 bp, Unknown
  Description of Unknown: RightRegion for integrase C40 sequence
cacaacaaggcatcaaccgaatactttaagaatgtcaatgtttcagtgaagtacgcttaatcaaatcattcgaagattatactggattgaaagttaataaaggtttattattaaacttagtggttgaaattaccattgacaaagatgatgtggcaattatcgattataaataatacgaattgaggagatgtttaattatgtcagatttaaaagaagtaacttcgttagctttcacattgttaattcaatcaggtgcgtta

SEQ ID NO: 37298 - DNA, 260 bp, Unknown
  Description of Unknown: RightRegion for integrase C41 sequence
ggggcccggttcaacggtgaacagcgcgtgcgtatccggtgggccgatgaggacgactaggcacccctagatgttcaagggtggtagggcagtgtgaggtacgccacactgtgaggtaacagagcggtcacggggacacctcccgtggccgctttcctcgtttcagcgcgtgccgcgcaacagcgccgaggggcaacctacactcaccacaccccctctgaccagggacaatgttacgagtgttgattctgacattaaag

SEQ ID NO: 37299 - DNA, 260 bp, Unknown
  Description of Unknown: RightRegion for integrase C42 sequence
ggggcacggttcaacggagaaaagcgcgtccggttcgcatgggccgaccaagacgcgtgagcacccctggacgttgaggggtgggcagttgtgagctaggccacacgtaacatcacagagcggtcacgggatctcggtcctgtggccgctctttgcgttcagcgcgtgccgcgcatgacagcggggaggggaaccgacatccgagacaccccctctgacctgggatgatgttgtgagtgttgattctgacacccaaagtg

SEQ ID NO: 37300 - DNA, 91 bp, Unknown
  Description of Unknown: RightRegion for integrase C43 sequence
acaccaattctaagatacaacttcctaattggggaaacagtcagcagctacgaatcgtagtcattatcttgataaacagataaagctgtat

SEQ ID NO: 37301 - DNA, 260 bp, Unknown
  Description of Unknown: RightRegion for integrase C44 sequence
ggggccatgctgcgaacaattggcgcgtcgtggtcaccgttctcgcagagtgcttcgtaggtcggctcaatccttcttgttgtaagaagcgaccgtatcgagaatagccttcaccagatcgatcgagtactgaggaacttctgccttaagtgcaaccccctccgccgtgtttccgaagaacttctccgcaagcttgaccttgacttcgttcttgacgctgtcaggcagccccgtgagataagggtcaacagcagacaact

SEQ ID NO: 37302 - DNA, 260 bp, Unknown
  Description of Unknown: RightRegion for integrase C45 sequence
gtgcaccccgtatgggagcctgacccctgggccgcgacggaggtcgcaaccacagcgtaggagcatgttttgtacacagtgaccaccggtactgtgtgtgaaacatgctgccgttgagctgcggaaatgcgtaaaagggccccgcaggaagaacctgcggggccctaccggccgcgtgcgtcacatcacatgcccgcacccctggcacacgaactggctctcgttcgtggggttgccctgatcgtccgtttcgacggtct

SEQ ID NO: 37303 - DNA, 260 bp, Unknown
  Description of Unknown: RightRegion for integrase C46 sequence
gtgcaccccgtatgggagtctgacccctgggccgcgacggaggtcgcaaccacagcgtaggagcatgttttgtacacagtgaccaccggtactgtgtgtgaaacatgctgccgttgagctgcggaaatgcgtaaaagggccccgcaggaagaacctgcggggccctaccggccgcgtgcgtcacatcacgtgaccgcagccctgacacacgaactgtgttgcgctcgtcgggttgccctggtcgtcggtctcgattgtct

SEQ ID NO: 37304 - DNA, 260 bp, Unknown
  Description of Unknown: RightRegion for integrase C47 sequence
actgtagatggaaataagataaaaattgatgctaaatttaatttgataaagaataattaatagtaattgatgaggctcatcgaacctctatatatttttttatgttttaaggtaaagtattttttactaatttttacatctgttacattttactaaccaaaatttttgcaataacttacctactatttgtccaagttgtcatttgctaatccaccattgggtaaataaatataataaataatcatataatctgttcacat

SEQ ID NO: 37305 - DNA, 260 bp, Unknown
  Description of Unknown: RightRegion for integrase C48 sequence
gataacgaaagaatacaggaaattgagatatattaccgatttattggaagagttgagtaatcaacaagagtaatatttttaactaagggaaaccggcggtgtctatacttgggtcagtcgcacattgggaaaacgattcggttttgccgcaatctttttccaatggtttgagataacagttggctacttgaccatgctgtatttcttaactggtgcattatcctatgcaacgggtattggtgctatacaaaacaataaat

SEQ ID NO: 37306 - DNA, 260 bp, Unknown
  Description of Unknown: RightRegion for integrase C49 sequence
cgtgaggtgtaccgggcggggattctcgcacatcgggtcgagttcgtctggcgcgcctaacgcccccgcgccttcggcaggccgcagagggcttgcagttgctcacgcacccgtgggtcagcgatgaccggaggcaggccctgcgctgcgcggctctcccgcgcgaggcgtgcgccgagtggttcgggggcatcggtcgaggctggttcgggcgtggttgtggtggtctgcgtcgaggtatccatgtagacaggtacgac

SEQ ID NO: 37307 - DNA, 260 bp, Unknown
  Description of Unknown: RightRegion for integrase C50 sequence
gccaaccaaagcgctactggagaagttgaagctggcacgcccactggacggcgcaaatgaaaaactctcaaaatagcgtagcgatttacgatgcagaaatgtagcgttggttgatttcctcgatcgtctgctaagggtcgatttcgggtatgcgttagaactgtaatgtccgcataggtcggttggaagcatacctcctagtcttggcataatttgcgctatcttgcctgcacgcccttaggttgcaatgtcgctaagca

SEQ ID NO: 37308 - DNA, 260 bp, Unknown
  Description of Unknown: RightRegion for integrase C51 sequence
ccgaaggacgtccgtgagcgactgatcgtccgagaggacgacttcgccgagcggttctgaggcacaacgcaagaagcccccgtcctcggagatgaggcgggggcttcgttgtgcgctacagcagctcggggtcgaacggaacttcggtgccgtcctccaggacgatcacgatgtggccctcgatcacggtgccactcgtccggccatctcgaaggcgcggtgagtgacgggcatggtgtccatgaagatgagctccatct

SEQ ID NO: 37309 - DNA, 260 bp, Unknown
  Description of Unknown: RightRegion for integrase C52 sequence
cccgaggacgtccgtgaccggctcctgatccgtgaggactcgttcgccgaagcgttctgaggcacaacgcaagaaggcccccagtcgagtgactgggggcttcttgttggttcagcgcaagcgatccgggtcgaaggggatgagctcaccctcctcggtctcgatgacgacctcgatctcgatcactcctgaccctccagctcccggaccttgtcctggaagtgctggctgcggcctgcttcccgcaggagcaggaggcg

SEQ ID NO: 37310 - DNA, 260 bp, Unknown
  Description of Unknown: RightRegion for integrase C53 sequence
tacgagcagcatctcaggctcggcagcgtggtcgaacagctacacaccgggatgtcgtagagcgactacccccgagaacgcagaaaagccccctacgcgccgcgtaagggcacgcagagggctctctggtagtctctattcagttgtgaggttgcgtacgtcagcgtggacgctagaggggtttacggggcctcgtggacccgcacgtacggttgcagaggcttgtcacggtaggcgtggtatcgctcggcctcctcggc

SEQ ID NO: 37311 - DNA, 260 bp, Unknown
  Description of Unknown: RightRegion for integrase C54 sequence
tacgagcagcatctcaggctcggcagcgtggtcgaacggctacacaccgggatgtcgtagagcggctacccggagaacgcagaaaagccccctacgcgccgtgtaagggcacgcagagggctctctggtagtctctattcagttgtggggttgcgtccgtcagcgtggacgctagaggggtttacggggcctcgtggacccgtacgtacggctgcagaggcttgtcacggtaggcgtggtagcgctcggcctcctcgacg

SEQ ID NO: 37312 - DNA, 260 bp, Unknown
  Description of Unknown: RightRegion for integrase C55 sequence
tacgagcagcatctcaggctcggcagcgtggtcgaacagctacacaccgggatgtcgtagagcggctacccgagaacgcagaaaagccccctacgcgccgtgtaagggcacgcagagggctctctggtagtctctattcagttgtgggtgtgcgcccgtctccgtggacgctagaggggtttacggggcctcgtggacccgtacgtacggctgcagaggcttgtcacggtaggcgtggtagcgctcggcctcctcggcgc

SEQ ID NO: 37313 - DNA, 260 bp, Unknown
  Description of Unknown: RightRegion for integrase C56 sequence
agcagcatgacgcgggtggagtgtcaccccgtgtgggacccggacccatggagtgcctgatctgcgagaactccggatggtgattactgatcgtatgcacttgttttggcaacactgacacttgacagtgtctgcaaaacaagcgtctcggtcgacgccttcggctaccggaacgcgcaaaagggccccgcaggttcttcctgcgggaccctaccggccgcgtgcgtcacatcacatgcccgcacccctgacacacgaac

SEQ ID NO: 37314 - DNA, 260 bp, Unknown
  Description of Unknown: RightRegion for integrase C57 sequence
tacgagcagcatctcaggctcggcagcgtggtcgaacagctacacaccgggatgtcgtagagcggctacctgagaacgcagaaaagccccctacgcgccgtgtaagggcacgcagagggctctctggtagtctctattcagttgtggggccgcgtccgtcagcgtggacgctagaggggtttacggggcctcgtggacccgcacgtacggctgcagaggcttgtcacggtaggcgtggtagcgctctttctcgtcggaga

SEQ ID NO: 37315 - DNA, 260 bp, Unknown
  Description of Unknown: RightRegion for integrase C58 sequence
caaccacattacgcgcaacgcctaacttttgaccgggacacgctacaaaaacacgtataaatgttgcttttcggcgcacaatataaacatgaaaaaattacttttaatgtcgcttgctgctcttgccattggtgcgccgtccgcgtctgcgtctgaatgtactgtacgtcacggcgattcattgtggaaaatcgcggaacgatacaatgtggattttaaccacataaaaaatataaacaaacatttaaaagacctgcaca

SEQ ID NO: 37316 - DNA, 260 bp, Unknown; identical to SEQ ID NO: 37315
  Description of Unknown: RightRegion for integrase C59 sequence

SEQ ID NO: 37317 - DNA, 260 bp, Unknown
  Description of Unknown: RightRegion for integrase C60 sequence
  modified_base (175)..(176): a, c, t, g, unknown or other
gacaagttcagcgtaacttttaaatcagagattagtgttgatgttgaaagggcatcgtaaaagccaaaggaatgtgagcatttgaaatgttacaaaactcagcctaggggggaatcctctctaggctgtttttatgctaaactcaagctattaagcaaacgtaaaccttttaacnntttaagctgggttcttgcggtttttgagagtgattttgctgtatgagggaagatatcaacgctctagggtcgagtgcacaggat

SEQ ID NO: 37318 - DNA, 260 bp, Unknown
  Description of Unknown: RightRegion for integrase C61 sequence
actcgaaattcagagagacaaaattatccctttaatataaaatttgagttctttgattgatctatatacagcctttgtgttgcttaatttgtctgtatatagtaactgattctaaataaaattcccattttatttaaacccgaaagctgcttgaatacatcgcaaatataaagtatcctgtatatgtatcataggggtttaacagccactataactccagagagctccctcacatagctctctgttttttttaatttata

SEQ ID NO: 37319 - DNA, 260 bp, Unknown
  Description of Unknown: RightRegion for integrase C62 sequence
gtgatcaagctgcgggaagagggatgggcggagttctggagcagcatatccagcgaatgaaatatttacacaaggcaccatcattggtagcagttcccccggatgatgatagtcggaggaaagtgcaatgcggtttttagtcttggcggttggagccctgtttttggttggctgtgctcaggtggtttccgtctgggcaaagcctggggctaccgaggaagaagagcgtgccatcgggaaaaaatgtgaatacgaggcgg

SEQ ID NO: 37320 - DNA, 260 bp, Unknown
  Description of Unknown: RightRegion for integrase C63 sequence
tacgagcagcatctcaggctcggcagcgtggtcgaacggctacacaccgggatgtcgtagagcgactacccccgagaacgcagaaaagccccctacgcgccgtgtaagggcacgcagagggctctctggtagtctctattcagttgtggggttgcgtccgtcagcgtggacgctagaggggtttacggggcctttccagcctggcgtccgcgcccgcctgtaagggtgtgtgagcagtgcagtacgggtctacccggctg

SEQ ID NO: 37321 - DNA, 260 bp, Unknown
  Description of Unknown: RightRegion for integrase C64 sequence
tacgagcagcatctcaggctcggcagcgtggtcgagcggctacacaccgggatgtcgtagagcggctacccgagaacgcagaaaagccccctacgcgccgtgtaagggcacgcagggggctctctggtagtctctattcagttgtggggttgcgtccgtcagcgtggacgctagaggggtttacggggcctcgtggacccgcacgtacggctgcagaggcttgtcacggtaggcgtggtagcgctcggcctcctcggcgc

SEQ ID NO: 37322 - DNA, 260 bp, Unknown; identical to SEQ ID NO: 37314
  Description of Unknown: RightRegion for integrase C65 sequence

SEQ ID NO: 37323 - DNA, 260 bp, Unknown
  Description of Unknown: RightRegion for integrase C66 sequence
tacgagcagcatctcaggctcggtagcgtggtcgaacggctacacaccgggatgtcgtagagcgactaccctgagaacgcagaaaagccccctacgcgccgtgtaagggcacgcagagggctctctggtagtctctattcagttgtactgctgagtccgtcagcgtgggtgctagaggggtttacggggcctcgtggacccgcacgtacggctgcagaggcttgtcacggtaggcgtggtagcgctcggcctcctcggcg

SEQ ID NO: 37324 - DNA, 260 bp, Unknown
  Description of Unknown: RightRegion for integrase C67 sequence
agatttctttttattttgaaatgcggattggaattagaagaagaggtgaaagaaacatgacacgcatcccatatggttaccgaatagtagacggtaaagcggttatagatgaagtaaaagctcaagaagtaagagagttttttcgtttctatcttgaatttaaaaatatttctcaagctgctaaaaaatcaggtataaaaagggcttggccagtcacgggcaaaattcttagcaagaaattgtatttaggaacagagttt

SEQ ID NO: 37325 - DNA, 260 bp, Unknown
  Description of Unknown: RightRegion for integrase C68 sequence
tatgaagataagctcaccgttgaattcaagtctgggattgagattgacgaagagatatagaatattaaccgccaattaggggctagcaccctttggcggttaatattggatttttttaattttaaagttgcttaaaacgacttgttgtgttaaaatatacgctgatacaaataagaatttaggaggaaccgaaactatgacagcctcaatgcgtttaagataagctggcaataaaaaaagcagaatctatccccgatgat

SEQ ID NO: 37326 - DNA, 260 bp, Unknown
  Description of Unknown: RightRegion for integrase C69 sequence
acagtttttgatgatatgcttacagtagagtttaagtcaggtgcagaaatagaggtataagagaagatttacaaaggccgccaactggggatacattccttggaatggcggtttttcttatgtacaaaattataaaacttgaaatatctggttcaatgctttataattaaggttgtatagaattaaagttatgaggtgattagtcaaaatgatcatataatcttatccactagtttttcaagttacagtagcatgggtag

SEQ ID NO: 37327 - DNA, 260 bp, Unknown
  Description of Unknown: RightRegion for integrase C70 sequence
tacgagcagcatctcaggctcggcagcgtggtcgaacagctacacaccgggatgtcgtagagcggctacccgagaacgcagaaaagccccctacgcgccgtgtaagggcacgcagagggctctctggtagtctctattcagttgtgaggttgcgtacgtcagcgtggacgctagaggggtttacggggcctcgtggacccgcacgtacggctgcagaggcttgtcacggtaggcgtggtagcgctcggcctcctcggcgc

SEQ ID NO: 37328 - DNA, 260 bp, Unknown
  Description of Unknown: RightRegion for integrase C71 sequence
ataaaagtagacaagcacatcagcctaaccttcaaaaatggcgtgcggattgatttataaaagacaaggcgtgtcagaattggcacgtctttttttgatgtttctgtgttataatagaagaagttatactaggatttgagatgcacacccctttagggttttgcacccccttgaaagggaaaaggttagattgtatgataaagctgattgcaacagatatggacggtacatttttggacgagaaggggcgggttgactcc

SEQ ID NO: 37329 - DNA, 260 bp, Unknown
  Description of Unknown: RightRegion for integrase C72 sequence
gtctctggtgcgaaagagatattcataaaatttaaaaacggacaaatcgtaagagtttaaaattttattgaaagttggtgatagtaatggtatagtagagtatgttcatacagaccttagtagacatttgttgtctattaaagtgtgtattagtatataacatattagggttaaacttggacattggtcttctatgtgatttaattcagactattttggcatttgctagtttagaaagaggtatatctatgaagatgtct

SEQ ID NO: 37330 - DNA, 260 bp, Unknown
  Description of Unknown: RightRegion for integrase C73 sequence
atcaatccagggaaaaaaataattattaaatttaaaaatcaaacggtcgtaactatctagtttacgaccgtttgttttatatccgcattttctcgattaagcaatcaattaagaataccctttcctcaatttttggaataataaaagttgattgaaaaatgattgttatcccaacgaaaattccccaccagaaagttgaaaatagagtaattgtaccgttgttaaaaaagtctaagtttgaaattataaaggatacaagt

SEQ ID NO: 37331 - DNA, 260 bp, Unknown
  Description of Unknown: RightRegion for integrase C74 sequence
gcttcgcttgatcctgtggttgagatggcgagacgagaaccaatgccggcaaatatatgagaactacgaaagccgggcttcgcgacttcgtcacaaacaatcggcatgccattcggctgacggtagattcgcgggcgccgatgaacccgctgcgtgtctccggtttgttgaagacctacaggcgccaagtcgacaatatgcaggaattcatcagggaagccgacgcggtgaaacaccagatggaaagcgtcgtcgatgcc

SEQ ID NO: 37332 - DNA, 260 bp, Unknown; identical to SEQ ID NO: 37331
  Description of Unknown: RightRegion for integrase C75 sequence

SEQ ID NO: 37333 - DNA, 260 bp, Unknown
  Description of Unknown: RightRegion for integrase C76 sequence
ttcgaagcgtgggaggagagagccgccgaggagcgactcaagcacggagtcccctcgtagcgtcaccgtgacgatttgcgcctttgcctcttgaccttcggaggcagaggtgctacgacctccacggtcccgtcaggcttggtgacggtcactggacccgctttcgggcggatgtctacgaccctgcgacgggccttgggggtgtactcgactccgtagccttgactcatgctctgagtatccctatcccgtcctcgatc

SEQ ID NO: 37334 - DNA, 260 bp, Unknown
  Description of Unknown: RightRegion for integrase C77 sequence
ggcggcgaagagttcctggcttccaccgtcctagctaaagcgggcattacgtcacggtgacgctttaaacgcaaaaaagccccccgaagcgccgaagcgccccgaggggtttctttgtctagtaggcccggatccagacctggccacgaccaccgtcgtagcctcggctgagctgagcggagccgttgcctgcgcctccgggtaccttgccgtcttggctgttcgcggtgttgtcggcaccgcccgtgtagaggatgccg

SEQ ID NO: 37335 - DNA, 260 bp, Unknown
  Description of Unknown: RightRegion for integrase C78 sequence
agagaaataccgatgctgtggagtgagcaaagggagaaattttacggctcagcgtcgtaacgtttataaaaacaacaatatgaaaaaacatcgaaaaaagtatgtgccagaaaattaaaaaaggttattacaaaaggagctactacaaagggccacacaaaagatgctgaaattgatatagaaaagtaagtcaatgttacagaatcaattatgtgaaaatatcaatataaataatgaagattttagtatattggatgcaa

SEQ ID NO: 37336 - DNA, 260 bp, Unknown
  Description of Unknown: RightRegion for integrase C79 sequence
aggtacctgctctgtcggaagggcgagcgcagctacttcgatcgaagctacgatgggtagctcacagcactctcacagggggagatctatgtacgaccgaccggtgcaaccgggttggtatccggatccgaacggcataccggggctcaggtggttcgacggcgagcagtggacaccaaacttcagcggggcacagcaggggccagcgccctctcaggcggtcgctgagaagccgaaggaccggaaccccttgttcctgt

SEQ ID NO: 37337 - DNA, 260 bp, Unknown
  Description of Unknown: RightRegion for integrase C80 sequence
gctatcagcggaagcgacgggcgtcgctttcgcaattggcgtccgcgccgcaaatcatagaacacccgttctatactcccgcccatgacaaagacgtgggcggacggactgccgatccgcgttgaggcggttgacgcccagggcgtgccagcgtcgttcggctggcagggccagacccacgcggtcgagcgcctagtccagcgctgggaggtcgagaccgactggtggtctgaggagggcgagacgcgccgcctattcgt

SEQ ID NO: 37338 - DNA, 260 bp, Unknown
  Description of Unknown: RightRegion for integrase C81 sequence
gccaagggcatgagcttcgaggaccaggtcgtcgtggagcctcggtacgtggccgcgtagctcccggaacgcaagaagccccgtcctccagagggaggcggggctgtcttgtgtcaggcgacgtgtcggcgaggcggctgaagctctccgaacagggtccgcacgatgcgggcttgctcgccggtcggtggaggcggcgggttgtcagtccagtgccgctcccacctggcgatacggtcggtcatgctcacggggccact

SEQ ID NO: 37339 - DNA, 260 bp, Unknown
  Description of Unknown: RightRegion for integrase C82 sequence
ccccggaacatcgaagtcgttgtgccacaggaccgcgtggcggtcgacctggctatttgacatcgcctatgccagggtgtgtgccatgtcaaatccggtcccatacccctaccccgtaccgccgaagcgcaaggctgcgcctaacccgctgttcctcgtcctcgcgatcctgtcggcgctgccgaccgcgttcttcgggctcgcgttcctcatgtccccgacgatgctctgggtgatggcgaccgggtggtgcggtatgt

SEQ ID NO: 37340 - DNA, 260 bp, Unknown
  Description of Unknown: RightRegion for integrase C83 sequence
ccccggaacatcgaggtcgtcgtgccccaggaccgcgtggcggtcgacctggctatttgacatcgcctatgccagggtgtgtgccatgtcaaatccggtgccatacccctaccccgtacctccgaagcggaagccagcgcccaacccgctgttcctcaccctcgcgatcctgtcagggttcccctcggcgttcttcctcttgctgttcgtctccggtgcgacctcgatcctcgtcgctggcgggttcatctggtcagcca

SEQ ID NO: 37341 - DNA, 260 bp, Unknown
  Description of Unknown: RightRegion for integrase C84 sequence
gttgggaagggccgccggaacgtcccgatcggtgagggcatcgggctcacctggctgtgagtcagcggcgccgcgcgcgtacacgccgcaaccggttcacgaggaccggtgcgtgcgcgagggcctcggggtcgtcgagcaggttgttgacgcgctgccagaaccgggtgaccgagatcccgaactcggcgtggaccgcgtcggcctggttgccggcgtagttccatcggtgggcggcgaagtcgagcaatccgcggtcg

SEQ ID NO: 37342 - DNA, 260 bp, Unknown; identical to SEQ ID NO: 31321
  Description of Unknown: RightRegion for integrase C85 sequence

SEQ ID NO: 37343 - DNA, 260 bp, Unknown
  Description of Unknown: RightRegion for integrase C86 sequence
ccccggaacatcgaggtcgtcgtgccccaggaccgcgtggcggttgacctggctatttgacatcgcctatgccagggtgtgtgtcatgtcaaatccggtgccatacccctaccccgtaccgtcgaagcggaagcccgcgcccaacccgctgttcctcaccctctcgatcctgtcggggttcccgaccgcgttcttcctactgctcttcgtgaccggtggcacctcgatcttcgtcatgatcgggttcctctggtcagcca

SEQ ID NO: 37344 - DNA, 260 bp, Unknown
  Description of Unknown: RightRegion for integrase C87 sequence
ctgaggctgggctcggctctggacctcgtaaacgcagaaaagccccctacgggccgctagggctcgcagagggcttctccggtagtctctattcagttgtactgctgagtccgtcagcgtggacgctagaggggtttacggggcctcgtggacccgcacgtacggctgcagaggcttgtcacggtaggcgtggtagcgctccgcctcctcggcgcggatggcctcgatctcctgagccgcactcaccttacgacgctgca

SEQ ID NO: 37345 - DNA, 260 bp, Unknown
  Description of Unknown: RightRegion for integrase C88 sequence
ccccggaacatcgaggtcgtcgtgccccaggaccgcgtggcggttgacctggctatttgacatcgcctatgccagggtgtgtgtcatgtcaaatccggtgccatacccctaccccgtaccgtcgaagcggaagcccgcgcccaacccgctattcctcaccctctcgatcctgtcgggattcccgaccgcgttcttcctgatcctcttcgtgtccggtggcacctcggtcttcgtcatgatcgggttcctctggtccgcga

SEQ ID NO: 37346 - DNA, 260 bp, Unknown
  Description of Unknown: RightRegion for integrase C89 sequence
ccccggaacatcgaggtcgtcgtgccccaggaccgcgtggcggttgacctggctatttgacatcgcctatgccagggtgtgtgtcatgtcaaatccggtgccatacccctaccccgtaccgtcgaagcggaagcccgcgcccaacccgctgttcctcaccctctcgatcctgtcggggttcccgaccgcgttcttcctactgctcttcgtgaccggtggcacctcgatcttcgtcatgatcgggttcctctggtccgcga

SEQ ID NO: 37347 - DNA, 260 bp, Unknown
  Description of Unknown: RightRegion for integrase C90 sequence
cggcgcaagcatggaaagctcttcgagcccgagcgagtcgatatcaagtggtactcgtgacgccggaggcggcctcgcccctcgccgggagacgccggaggagtcgtgtaaacgccctcgcaagacggaaagcatgacgaaatgacggaactaacgtcatactccatctccccttaaagttctctctctcttaaagcccaaatacagaatgacgtttcttccgtcatatcgtcatgcggcccgtcatggcccctccaagg

SEQ ID NO: 37348 - DNA, 260 bp, Unknown
  Description of Unknown: RightRegion for integrase C91 sequence
tacgagcagcatctcaggctcggcagcgtggtcgaacagctacacaccgggatgtcgtagagcggctacccccgagaacgcagaaaagccccctacgggccgctagggctcgcagagggcttctccggtagtctctattcagttgtgggtgtgcgtccgtctccgtggacgctagaggggtttacggggcctcgtggacccgcacgtacggctgcagaggcttgtcacggtaggtgtggtagcgctcggcctcctcggcg

SEQ ID NO: 37349 - DNA, 260 bp, Unknown
  Description of Unknown: RightRegion for integrase C92 sequence
tacgagcagcatctcaggctcggcagcgtggtcgaacggctacacaccgggatgtcgtagagcggatacccgagaacgcagaaaagccccctacgcgccgtgtaagggcgcgcagagggctctctggtagtctctattcagttgtggggttgcgtccgtcagcgtggacgctagaggggtttacggggcctcgtggacccgtacgtacggctgcagaggcttgtcacggtaggcgtggtatcgctcggcctcctcggcgc

SEQ ID NO: 37350 - DNA, 260 bp, Unknown
  Description of Unknown: RightRegion for integrase C93 sequence
tacgagcagcatctcaggctcggcagcgtggtcgaacggctacacaccgggatgtcgtagagcggctacccgagaacgcagaaaagccccctacgcgccgtgtaagggcacgcagagggctctctggtagtctctattcagttgtggggttgcgtccgtcagcgtggacgctagaggggtttacggggcctcgtggacccgcacgtacggctgcagaggcttgtcacggtaggcgtggtatcgctcggcctcctcggcgc

SEQ ID NO: 37351 - DNA, 260 bp, Unknown
  Description of Unknown: RightRegion for integrase C94 sequence
tacgagcagcatctcaggctcggcagcgtggtcgaacagctgcataccgggatgtcgtagagcggctacccgagaatgcagaaaagccccctacgcgccgtgtaagggcacgcagagggctctctggtagtctctattcagttgtgaggttgcgtacgtcagcgtggacgctagaggggtttacggggcctcgtggacccgtacgtacggctgcagaggcttgtcacggtaggcgtggtagcgctccgcctcctcggcgc

SEQ ID NO: 37352 - DNA, 260 bp, Unknown
  Description of Unknown: RightRegion for integrase C95 sequence
tacgagcagcacctcaggctcggtagcgtggtcgaacggctacacaccgggatgtcgtagagcgactacctgagaacgcagaaaagccctctacgcgccgtgtaagggcacgcagagggctctctggcagtctctattcagttgtgaggttgcgtacgtcagcgtggacgctagaggggtttacggggcctcgtggacccgcacgtacggctgcagaggcttgtcacggtaggcgtggtagcgctctttctcggcggtcg

SEQ ID NO: 37353 - DNA, 260 bp, Unknown
  Description of Unknown: RightRegion for integrase C96 sequence
ctgaagtcgagcaagcccatgaacttcgctctacacgtcccgcagaaggaggcaggatgacgaacccagctccaggttggtacccggaccccgcaggtacaaaccagccgaggtactgggacgggaagaagtgggtgggagaaccgaccactgtgccggtgaagacgaaccacgcgctgcatctcctgctgacgatcctcaccttctggatgttcggaggctggctgtgggtctggattctcgtcgcaatcgccaaccac

SEQ ID NO: 37354 - DNA, 260 bp, Unknown
  Description of Unknown: RightRegion for integrase C97 sequence
tccaagttgccgctgggccacaacatcgacatccactggcataatcccagcgataattgagatccggttgacctgagcttcggtcaagggtgggctgtcagcggcttcgcgccggatggcagcccactctccttctgtcagaccgaggctcatcagatctcctccgtcttcaggttcggccagcagtaatgcacgaaccccatatcgtcctcgaccacgacatcaccacagtcactgaagctcagcagcttgccggtggc

SEQ ID NO: 37355 - DNA, 260 bp, Unknown
  Description of Unknown: RightRegion for integrase C98 sequence
tacgagcagcatctcaggctcggcagcgtggtcgaacagctacacaccgggatgtcgtagagcgactacccccccccccccgagaacgcagaaaagccccctacgcgccgtgtaagggcacgcagagggctctctggtagtctctattcagttgtggggttgcatccgtcagcgtggacgctagaggggtttacggggcctcgtggacccgtacgtacggctgcagaggcttgtcacggtaggcgtggtagcgctctttc

SEQ ID NO: 37356 - DNA, 260 bp, Unknown
  Description of Unknown: RightRegion for integrase C99 sequence
tacgagcagcatctcaggctcggcagcgtggtcgaacggctacacaacgggatgtcgtagagcggctacccgagaacgcagaaaagccccctacgcgccgtgtaagggcacgcagagggctctctggtagtctctattcagttgtggggttgcgtccgtcagcgtggacgctagaggggtttacggggcctcgtggacccgcacgtacggctgcagaggcttgtcacggtaggcgtggtagcgctccgcctcctcggcgc

SEQ ID NO: 37357 - DNA, 260 bp, Unknown
  Description of Unknown: RightRegion for integrase C100 sequence
ctgaggctgggcgcggctctggacctcgtaaacgcagaaaagccccctacgggccgctagggctcgcagagggcttctccggtagtctctattcagttgtactgctgagtccgtcagcgtgggcgctagaggggtttacggggcctttccagcctgccgtccgggtatacgatagtaaccggcttccttgcgtccagcgcgaacccgatcgtgttccaagtcccgctaccctgacgataaggtccgtctggtagagccaa

SEQ ID NO: 37358 - DNA, 260 bp, Unknown
  Description of Unknown: RightRegion for integrase C101 sequence
ctgaggctgggcgcggctctagacctcgtaaacgcagaaaagccccctacgggccgctaggggctcgcagagggcttctccggcagtctctattcagttgtactgctgagtccgtcagcgtggacgctagaggggtttacggggcctcgtggacccgcacgtacggctgcagaggcttgtcacgataggcgtggtagcgctcggcctcctcggcgcggatggcctcgatctcctgagccgcgctcaccttacgacgctgc

SEQ ID NO: 37359 - DNA, 260 bp, Unknown
  Description of Unknown: RightRegion for integrase C102 sequence
tacgagcagcatctcaggctcggcagcgtggtcgaacggctacacaccgggatgtcgtagagcgactacccgagaacgcagaaaagccccctacgcgccgtgtaagggcacgcagagggctctctggtagtctctattcagttgtggggttgcgtccgtctccgtggacgctagaggggtttacggggcctcgtggacccgcacgtacggttgcagaggcttgtcacggtaggcgtggtatcgctcggcctcctcggcgc

SEQ ID NO: 37360 - DNA, 260 bp, Unknown
  Description of Unknown: RightRegion for integrase C103 sequence
aaccttgagcgcctcgccgaattacgatacctgtccctggcgtcaatgttcggcccgtaagccagttcgacgcacagcctgaagcgcaacataccgacatcagcattagtgaggagttccgccatggcccggcttgtttcccgtggcgccgcactgtacgtgcgagcgtcgactgagcatcagaattactcgacagaccatcaagagtcggccctacgagaatatgcagttcagcacgatttcgaagtcattgctattta

SEQ ID NO: 37361 - DNA, 260 bp, Unknown
  Description of Unknown: RightRegion for integrase C104 sequence
ctgctcagataccagcagtttgcgtatgcctcaatgtctcgcgtatttggacttgactagtaagaagcacctatcagaaatgatagctcggaacccattactcggcgctaggatctgagccatgtctagcttgggagcgaaaccatgtgtgcattgttcagtactgtccgtttcgaggtacctcatccatacgaagtgcttgccgagcgggcatcgatcgaacctgtattgtaaggctgctcgtactttgattcgtcggc

SEQ ID NO: 37362 - DNA, 260 bp, Unknown
  Description of Unknown: RightRegion for integrase C105 sequence
gagcaatatctgagcatcccgtaccgcatcatgatccccacgaacgggcgcggagtatagcggcggaggggcggcaagtacaacagccggcggcacccggtcgccttgggcgcctgcaaaataattttgcaaaacacttgcgccccttggttttgtctgtacaataggcccatcagcagcaaagcaaccgccccggcggaaccgggaatcctgaaaggagcaacatcatgagcaacatccaaaaagccgccaaaaccctc

SEQ ID NO: 37363 - DNA, 260 bp, Unknown; identical to SEQ ID NO: 24713
  Description of Unknown: RightRegion for integrase C106 sequence

SEQ ID NO: 37364 - DNA, 59 bp, Unknown
  Description of Unknown: RightRegion for integrase C107 sequence
aggcttataaacaaggttaaggtgacagctgaggacattgttatcaattggaaaatata

SEQ ID NO: 37365 - DNA, 59 bp, Unknown; identical to SEQ ID NO: 37364
  Description of Unknown: RightRegion for integrase C108 sequence

SEQ ID NO: 37366 - DNA, 59 bp, Unknown; identical to SEQ ID NO: 37364
  Description of Unknown: RightRegion for integrase C109 sequence

SEQ ID NO: 37367 - DNA, 260 bp, Unknown; identical to SEQ ID NO: 24622
  Description of Unknown: RightRegion for integrase C110 sequence

SEQ ID NO: 37368 - DNA, 260 bp, Unknown
  Description of Unknown: RightRegion for integrase C111 sequence
acgacgtcgcggcgagcgccgatcgagcccgagcgcgtaacgttccgctggaactcctgacgccgggcggagacgccggaggaggagcgtgtaaacgccctcccacccctctcccatgacgaaaccatgacgatatgacggttctaacgtcatttcatatctccccttaagagctctctctctttaagcactaatagagaatgacgtaacttccgtcatatcgtcatggaaacgtcattgcatcccgtctgagcagatcg

SEQ ID NO: 37369 - DNA, 260 bp, Unknown
  Description of Unknown: RightRegion for integrase C112 sequence
gcgacgtcgcgccgggcgccgatcgaccccgagcgggtaactttccgctggaactcctgacgccggagccgcgacgccgggaggggagcgtgtaaacgccctccgtagtgaggaaaagtgaagaaagtgagctaagttccttccctcttgttctatctataaggactctctctcttatagctggaaccggagggaaggaactttcttcacttccttcactaaaacttccttcggcccgtcctgagcaactagcccgaccg

SEQ ID NO: 37370 - DNA, 59 bp, Unknown; identical to SEQ ID NO: 37364
  Description of Unknown: RightRegion for integrase C113 sequence

SEQ ID NO: 37371 - DNA, 260 bp, Unknown
  Description of Unknown: RightRegion for integrase C114 sequence
ggagcgttctacttcgatctcgttgtcccagaggacctccgggagcgaatgtccctctaacgcaaaaaagccccctcccggggatcacccaggagggggccattgcttactcgacggtgtagccgagaacggcgagggcatcctcgtgggatgtccctgccgggaatctgttgatcggggtaaggctggtagcgataccctcttcgttgcaggcgaagacgaccgtgggtcgaacgacctccttcagcgcctgcctgccg

SEQ ID NO: 37372 - DNA, 260 bp, Unknown
  Description of Unknown: RightRegion for integrase C115 sequence
gataggattgagatatttgagaacggggatataaaaatcgtctacaggatagaaatgtagtctttactatctacaattatgcataacaaatgaagtgcataattgtaactagtgattacgattataaaaactttctcaatatttttcagaagaataggagaatacatgttcttatttatatggtagaatattttgtaaatacagggagaaggcgttatttgtttgaaatgaagggggcttttcaattgagatttcacaaa

SEQ ID NO: 37373 - DNA, 260 bp, Unknown
  Description of Unknown: RightRegion for integrase C116 sequence
gataggattgagatatttgagaacggggatataaaaatcgtctacaggatagaaatgtaatctttactagttacaattacacattacaaatgaaatgtataattgtaactagtaattacagttataaaaactttctcaatatttttcagaagaatgggagaatacatgttcccatttgtatggtagaatattttgtaaatacagggagaaggcgttatttgtttgaaatgaagggggcttttcaattgagatttcacaaa

SEQ ID NO: 37374 - DNA, 260 bp, Unknown; identical to SEQ ID NO: 24767
  Description of Unknown: RightRegion for integrase C117 sequence

SEQ ID NO: 37375 - DNA, 260 bp, Unknown
  Description of Unknown: RightRegion for integrase C118 sequence
aagaaaattacactaagtaaagataagtatatcgaaatcgaatatacattttctttataattttatagttagttattagttactgtaagattcgtaactgtactaccaacagcgggtgattggtttggatttacggtatattcataatttacaagagcattatttgttaatgtgccactaggtggtatcgctaaaatttgtgcttgaaaagtaatgaatacagtatctcctgggggaatatctgctaagtgaataccaag

SEQ ID NO: 37376 - DNA, 260 bp, Unknown
  Description of Unknown: RightRegion for integrase C119 sequence
aagaaaatcacacttagtaaggataagtatatcgacatcgaatatacattttctttatagttttaaagttggttattagttaccgtgacatttatcacggtacccaataaccaatgaatatctgagaaattgaacatttttagtaaacaatattttctcaatatgagaattgcgctttacagaacgcatgctcttattaatgtgataaaatattctgtaaatataatggaaaaagtgttgcttattgaaatgaagggggt

SEQ ID NO: 37377 - DNA, 260 bp, Unknown
  Description of Unknown: RightRegion for integrase C120 sequence
accgtcacaaacccacgccagtggcacctccatgttgagtccctgctgggacaggattagatgtcctgcttgtcgaagcagggagggcagaaaccccagatggagtcgtgctcgggcatggacaccccgcacccgccacatggtgtcatcgggtactgcggacggttgtacctcagcttttctggccagatgacttctgcgactccgacgtcggtcgagaagactcggccgtcgtccattgggtatacgactctgtcgat

SEQ ID NO: 37378 - DNA, 260 bp, Unknown
  Description of Unknown: RightRegion for integrase C121 sequence
gtcgggaagggccggcggaacgtcccgatcggtgagggcatcggcctcacctggctgtgactcagcggcgtcgtgatcgcaaacgccgcagccggttgacgagcgccggtgcgtgctcgagcgccgcggggtcgtcgagcaggttgttcacgcgctgccagaaccgagtgaccgacataccgaactcggtgcggaccgcgtcggcctggttgccgctgtggttccagcggagcgcggcgaagtcgaggattcttcgatcg

SEQ ID NO: 37379 - DNA, 260 bp, Unknown
  Description of Unknown: RightRegion for integrase C122 sequence
ggtgtgttggagttccacctgaaggtccccgaggacgtgagagaacgcctctccgcttaaacgcaaaaaagccccctcccaagacatttcgtcctgagagggggtttcttcttagatcacgtcatatccgacctgcctcagagcttcatcgtgaggcgtgccggacagcagcgtatagagccggtccatgctcgtcgcaacgccgttctcgtcgcactccacgacgacggtaggcgaaacaaccaccgcgtgttgaccga

SEQ ID NO: 37380 - DNA, 60 bp, Unknown
  Description of Unknown: RightRegion for integrase C123 sequence
aacctgatagataaggtatttgttaaacctggcatcattgatataaattggagaatttag

SEQ ID NO: 37381 - DNA, 107 bp, Unknown
  Description of Unknown: RightRegion for integrase C124 sequence
gtattcggaaggtacccccaattgcccgttgttgaaataaccaactataaacttaaataattttttattatatgggttacttatcgtatcaatggatcctcatgcat

SEQ ID NO: 37382 - DNA, 260 bp, Unknown
  Description of Unknown: RightRegion for integrase C125 sequence
ggcgcactgaagttcgacttccgagtccccgaggacatcgagaagagactctccgcgtgaacgcaaaaaagccccccctcccggagcccgaaggccctgagaggggggtttctttgtgtctagccgactctggccatcgagaaccacgtcagcgatgcgttggcgtcaccgacaatggtgacatcaccatcggtcttgagaccgggctgcactgtcgcgcctgccgcgagatagtaggtcacaccgtcgccgccgtaggc

SEQ ID NO: 37383 - DNA, 260 bp, Unknown
  Description of Unknown: RightRegion for integrase C126 sequence
atgtcctccatgtctgtcgatgaccacgtcacgatcgagtggcgggacgtgagcgagtagcagatacgacgaagccccggctaccccctttcaggggtgccggggctttcgtttgtcagttgtggtggccgctctccatctgctcgatgacctccagggcctcctcgtacctgcctgcctcctgcatcaggaggaggcggaggtcggcgagcttgacctgggcccacttcgggagccgggcctctcgctcggagctcatc

SEQ ID NO: 37384 - DNA, 82 bp, Unknown
  Description of Unknown: RightRegion for integrase C127 sequence
gccgtccagatcgtgatcggggcggagggatggcaggagatccgggtgcagttgccttaacagggaaatccggcccctgaat

SEQ ID NO: 37385 - DNA, 260 bp, Unknown
  Description of Unknown: RightRegion for integrase C128 sequence
aatgcggtcgagtcagtgctcaacgagcctgaggacgcattgaacaggctgacggcctagctacttcccgttggcggcgttgtacgcatccacgatctccttggcgatgttgccacgggtcgcaacttcatagccgttctctctggcccattccctgattgctgtgcgctcttgcttaccggcattgcgcggtgcaacttctatgttggtcctggtcctacctcggggctgtttcactttcatgtgggcggcctctaggt

SEQ ID NO: 37386 - DNA, 260 bp, Unknown
  Description of Unknown: RightRegion for integrase C129 sequence
atgtcctccatgactgtcgatgatcacgtcacgatcgagtggcgggacgtgagcgagtagcaggtacgacgaagccccggctaccccctttcgggggtaccggggccttgtcttgtctcactccccccgttcgggggtggtgtcagttgtggtggccgctctccatgcgctcgatctccttcagcgcatcctcgtacctggccgcctcctgcatgaggagcaggcggaagtcaccgagcttgtcctgcgcccaccgcggc

SEQ ID NO: 37387 - DNA, 260 bp, Unknown
  Description of Unknown: RightRegion for integrase C130 sequence
tataagcgtggaacaggaaaggctagagaaatcattattgtttcagcctcagctaaataaagtgtcttttgtaggtaacagtactattatacccacaaaagacacacaatttacaactcataaaaagacttaatatcacaagggagtttctcacacaaactgaggaactctctttttcttttttcgctcattgtaaatatacaaagcttaggttgctgtccgaaccggttcttaatttcttgccacatctctttatactt

SEQ ID NO: 37388 - DNA, 260 bp, Unknown
  Description of Unknown: RightRegion for integrase C131 sequence
aaggcgccccagcgcgggaagtggtcgccggagcgcgtccgcgtcgacttccacggctgacacgagcgccgggcaggagcgccggaggcgtcgtgtaaacgccctcccagatcgaatagtgacgatagtgagctaattacgtcactttcgtatccatgtataaggagtctctctcttataggtggataggaaagtgaagtaaaacgctcactatcgtcactttttcgtctctgtgagtagcaagtcgatcggggcaccct

SEQ ID NO: 37389 - DNA, 260 bp, Unknown
  Description of Unknown: RightRegion for integrase C132 sequence
aaggcgccccagcgcgggaagtggtcgccggagcgcgtccgcgtcgacttccacggctgacgagcgccgggcaggagcgccggaggcgtcgtgtaaacgccctccccagatcgaatagtgacgatagtgagctaattacgtcactttcgtatccatgtataaggagtctctctcttataggtggataggaaagtgaagtaaaacgctcactatcgtcactttttcgtctctgtgagtagcaagtcgagcggggcacccta

SEQ ID NO: 37390 - DNA, 260 bp, Unknown
  Description of Unknown: RightRegion for integrase C133 sequence
ctgacctccatgactgtcgatgatcacgtcacgatcgagtggcgggacgtgagcgagtaacgggtacgacgaagccccggctacccccattcgggggtgccggggctttcgcttgtcagttgtggtggccgctctccattcgctcgatgatgccgagggcgtcctcgtacctgcctgcctcctgcatcaggaggaggcggaggtcggcgagcttggctcgcgcccacttcgggaggaccgtctctcgctcggagctcatg

SEQ ID NO: 37391 - DNA, 260 bp, Unknown
  Description of Unknown: RightRegion for integrase C134 sequence
cactggaacgacgaccgcgtcgagctcgtcgactacatggccgggcagctcgacgactagctcctcctcccccgtaccccctcctgggacgccggggatgccgctgcctacgtcacaccccctagctatccatagaagaagaccgcctccgcccgtctagcgccggtgaggtgaccataacgaaacaacaacgaacgtcttacgggtgacgtagaatcgagacaacttcgctcacgagtgacgatatgacggttattccg

SEQ ID NO: 37392 - DNA, 260 bp, Unknown
  Description of Unknown: RightRegion for integrase C135 sequence
ccgacgaaggcgaaggccctcgtcccgacctccaccgaggtcgtgcccagacgaaggtgacaacacagaaaggccccctccccggcgcaatgccaggaagggggccttcgtcatgctgcttgctgttcgtctcgcaagcgagcgcggtaccggaggttgatccgggtcagctcgcggttctgttgatcagtgaggggtggccagcccgcgacgatcgcgcgggccagctccatccgttcctcgaaggtcacgtgccgatg

SEQ ID NO: 37393 - DNA, 260 bp, Unknown
  Description of Unknown: RightRegion for integrase C136 sequence
cgagcgccccagcgcgggaagtggaaccccgagcgcgtctcggtagccttccacggctgactcctgaaaatcaccctccctcggctcggcgccggaggcggctcgccccgcgtcgacgccggaggaggagcgtgtaaacgccctcagtgactccatgagtggtgaagtgacggatctttcgtcactctcgtttgttttctaaggaagaagaactctagagagagtaatagagagtgacggttctttcgtcactttcgtca

SEQ ID NO: 37394 - DNA, 260 bp, Unknown
  Description of Unknown: RightRegion for integrase C137 sequence
cgggcgccccagcgcgggaagtggtcgccggagcgcgtccgcgtcgacttccacggctgaaacgccggacggagacgccggaggaggagcgtgtaaacgccctccccaccctcccccatgacgaaaccatgacgatatgacggttctaacgtcatttcatatctccccttaagagctctctctctttaagcactaatagagaatgacgtaacttccgtcatatcgtcatggaaacgtcattgcaccccatctgagcagat

SEQ ID NO: 37395 - DNA, 260 bp, Unknown
  Description of Unknown: RightRegion for integrase C138 sequence
cgggcgccccagcgcgggaagtggtcgccggagcgcgtccgcgtcgacttccacggctgaaacgcgggaggcgggacgccggaggaggagcgtgtaaacgccctccaagaggctaggagtggtgaagtgacggatctttcgtcactcccgtttgttttctaaggaagaagaactctagagagagtaatagagagtgacggttctttcgtcactttcgtcacctttcgtcaccgcctcccccaaaccgacccaaaaaattg

SEQ ID NO: 37396 - DNA, 260 bp, Unknown
  Description of Unknown: RightRegion for integrase C139 sequence
agggcgcctcagcgcgggaagtggaaccccgagcgcgtccgcgtcgacttccacggctgacgccgggaggcgagccgcgcccgttgcgccggagaggagcgtgtaaacgccctcccgagggcagatagtgaagatagtgagcgtattgcttcactttcgtatccatgtataagaactctctctcttaagcatggataggaaagtgaagtaacttcgctcacttgcttcactaaaacttcttcggccctccctgagcatcc

SEQ ID NO: 37397 - DNA, 260 bp, Unknown
  Description of Unknown: RightRegion for integrase C140 sequence
cgcaccttcgacacgcagactgtcgcctttaggccgaaaaatccggcgctgcagatgtagcctgcacttgctcgaccacaactgaatacaacaactgaatagggctcgacatgcaacagctcgccgatttcgaggcgcagtatggcgccgacatggacgccgccgcggcacagttccccccgctgaccgatgctcagcgcggtcaaatagccacggtgctgcgcggcaattcgacacggcactcagcggcggcatagaac

SEQ ID NO: 37398 - DNA, 260 bp, Unknown
  Description of Unknown: RightRegion for integrase C141 sequence
cgggcgccccagcgcgggaagtggtcgccggagcgcgtccgcgtcgacttccacggctgaaacgccgggcggagacgccggaggaggagcgtgtaaacgccctcccgaccctcccccatgacgaaaccatgacgatatgacggttctaacgtcatttcatatctccccttaagagctctctctctttaagcactaatagagaatgacgtaacttccgtcatatcgtcatggaaacgtcattgcatcccatctgagcagat

SEQ ID NO: 37399 - DNA, 115 bp, Unknown
  Description of Unknown: RightRegion for integrase C142 sequence
cgtgtaggtaagaatccaattgcaccagtaataaaggttacagatttcaaaataaaataatcgcagcctaactgtattcatttgatgtagttaggttgtgtttaattgaccaaac

SEQ ID NO: 37400 - DNA, 260 bp, Unknown
  Description of Unknown: RightRegion for integrase C143 sequence
cctgagtttgaaccgcgcctcactggtcttgcttcggaaagatggagagcactcttatagcccaggaggatctccatgccccagacacgctttacgaaagagtttcaggatgaggcggtgcggcttgctctgacgagcggccgcagccggcgcgcgattgccgcggatctcggggttggtctgtcgaccctgcgccactggattgatcgtcgccgcgagcgtgagatcgatgatccgcccgaagagcgccaggaggatat

SEQ ID NO: 37401 - DNA, 260 bp, Unknown
  Description of Unknown: RightRegion for integrase C144 sequence
aaactacacctgcatatacccgacgacatactggaacgtatggctttgaaaggagaatgatgaggaagctagtgccagtgttgctgctagcgctgacggcatgtagtaccaaccacgagacgcctacagaagccccggtgaagcggggggtagttgtgttcgaggtcgggggtgactattcgttcgcctcgtacgacgacaactaccaaaacggtattcgataccaaccaggtcagacccgagtggaactgcggggcgac

SEQ ID NO: 37402 - DNA, 260 bp, Unknown
  Description of Unknown: RightRegion for integrase C145 sequence
cgtgtgcgatcacgctgggagctgggggtagaggtgtaccccaagcgtctggcccaatgacgtaaccacaactgaatacacaactgaatatcgaggtgcggcggcttatgaccgatcagcagcgggccgaatggatcgcccggcagacagcccgatttcaacccggggatctggatgccgggcttgaggtggttcggcggcgcttgcgccgcaataggattgagactccccgcgcggcttgagttctcgggttgcgatgt

SEQ ID NO: 37403 - DNA, 260 bp, Unknown
  Description of Unknown: RightRegion for integrase C146 sequence
atcgggaaggggcgccgcaacgtgcctattggcgaaggcatcgaactcagctggctgtgaccggttcagcggcgccgcgaccgtatgcgccgcagccgattgacgagcgctggggcgtgctcgatggccgccgggtcgtcgagcaggttgttgacgcgctgccagaaccgggtgaccgagatgccgaactcggtgcggaccgcctccgcctggttgccggcgtagttccaccggtgggcggcgaagtcgagcaacgcgcg

SEQ ID NO: 37404 - DNA, 260 bp, Unknown
  Description of Unknown: RightRegion for integrase C147 sequence
accattacaatagagatacaaggtaaagactttgttatcactgatcacacgctcctttaagtgttttgcctaaaggagcatttacacttgatagtgctatgttaggcaaaaaaagagcgccctttaatggacgcccttttttatttgaatgatccccagtaatctacacgctttccgttttcactctcaccagttgccatataaccgtatgttccgtttgctcgtggttgtctgatccatacgtgaccatcttgctcaat

SEQ ID NO: 37405 - DNA, 260 bp, Unknown
  Description of Unknown: RightRegion for integrase C148 sequence
gatgtggtgcgcgccacgggccggacaccggcacaagccgcaggggaggtcctggcatgaggcgcacgacggtggaatttccaggggagccgatggtgttgcatacgcacgacggtggcatcgcggtctccatcccgatccgcgtgcgccgctacagcggccggcggcaggtggtggtgccgcagggcatcgcctccgcacacgaggaaacgcatgcgccaacagccctgcagattgcgttggcccgcggacaccgttgg

SEQ ID NO: 37406 - DNA, 260 bp, Unknown
  Description of Unknown: RightRegion for integrase C149 sequence
cacgttaaaagagggaaaactaagcattctatcaaaataaagaatattgatttttattaacttcttttgtgcggaactacgaacagtttatcaacacgaagtgtacaaactcccatacaaaaataaccacgtcaattaagacgtggtttctatttgtttaacttactaattttctttcgatatattttgggtatgctttttgcgggtacaaatcgccttttttatggtcaagtactacgtatctatcgtttacccaatat

SEQ ID NO: 37407 - DNA, 260 bp, Unknown; identical to SEQ ID NO: 24896
  Description of Unknown: RightRegion for integrase C150 sequence

SEQ ID NO: 37408 - DNA, 260 bp, Unknown; identical to SEQ ID NO: 24897
  Description of Unknown: RightRegion for integrase C151 sequence

SEQ ID NO: 37409 - DNA, 260 bp, Unknown
  Description of Unknown: RightRegion for integrase C152 sequence
gaatatgtaaaacttaaaaacaggcattctattaaaataaacgatatagaattttattaacttacgtacggaagtatagacactctattaatacttaatgtgtatacttccgtaaatttataaagaaagaccacacccattaaggaatagtctttaaaaaatattatatcttttaattgaaaatcaaaaattattttttatcagaaccctattttcccttcatcatcatctacaaaatttaacttcatcaatttctgtat

SEQ ID NO: 37410 - DNA, 260 bp, Unknown
  Description of Unknown: RightRegion for integrase C153 sequence
attatcgataacataatagtatttccagatggcaatataacagtaaatttccttatataatttatgtgtactaacttatatattccggaaggataatataggttagtacacgtataaaaatatcttttatattgacacaatttatttaacaagtataataataattgaaagtgaatttaaacaaatatacaccataaacacaacgtacctgcgaatacgttgtgtttttttctttttcaaaaaaagacgcttaccgctgc

SEQ ID NO: 37411 - DNA, 260 bp, Unknown
  Description of Unknown: RightRegion for integrase C154 sequence
ggcttgaataaattgctgcgcgatacccttgagtcaaatgcgttgcgagaggcagcatgatgaacgacggcacagacggcttcatcactaacataccgatggccttcaaaaaacgcagtggcaaggcggtgatcgtgctgcccaacggcgagcgcgctatcgcgcgccgagaagcaattattgacaattcgatgatcaaagttatagcaagggcttatcgttggcagcgaatgctgttggacggtacgcactcctcaatc

SEQ ID NO: 37412 - DNA, 260 bp, Unknown
  Description of Unknown: RightRegion for integrase C155 sequence
ggagagccccacgttacgtacaagagtccgcttcatgaaatggaagaacggctggaataattgtaacgggttcgattttgaagtaaaaaaaggtaaatagcaaccaaattcgttgatcaaataacagcatttattagcatccttagctctgtttgcgggttgagaagaaaagtctcttccagaacctatacctgtcgctgcgggtatagggaacaacgcgatactcacgaggctaaaaatagtttaaatataaattttca

SEQ ID NO: 37413 - DNA, 260 bp, Unknown; identical to SEQ ID NO: 24938
  Description of Unknown: RightRegion for integrase C156 sequence

SEQ ID NO: 37414 - DNA, 260 bp, Unknown
  Description of Unknown: RightRegion for integrase C157 sequence
atttcagaagatgggcagataagtgtaaaattcttagaggggactgaggtagatttgtaagtgactgtggccgaaaggttgcagtttttttgttgtttcgtggtataataaaactaatttaatgaatgataaaaggataggaggactaaataatggcaaatgaactacagccgctttctttactttttcaaaacagacttttcagaattccggattatcagagaggctatgcttggcagcagtcacagcttactgatttt

SEQ ID NO: 37415 - DNA, 260 bp, Unknown; identical to SEQ ID NO: 37414
  Description of Unknown: RightRegion for integrase C158 sequence

SEQ ID NO: 37416 - DNA, 260 bp, Unknown
  Description of Unknown: RightRegion for integrase C159 sequence
attgtggaggatggacagataactgtcagatttttagaaggaactgaggtagacttgtaactaggctattactctagttaatgtttgcaattagacatatatgcatcatacgagatttccaatggctcataaatcgaaatagttttaagctcaatcaacggtcgtggggctgaccccaaaaaagtgagaatttaataaaatcaccctagggctaccgtctccggtattcaaccggagacaggtagtccaatttttgttgg

SEQ ID NO: 37417 - DNA, 260 bp, Unknown
  Description of Unknown: RightRegion for integrase C160 sequence
ataggacttgatggtgaaataaccgtttgtttactggaaggaactgaggtagatttataaagcaaacgtaagcattatgtgcaatcctaccatgaggacgaggaaataaccccggagcaggctcacaagaacgctgtcgagctggcagagcatacaaaggcatggaaagggcatgaagttctgatagccacgcatatagacaaggggcatatacacacgcactttattgtcaattccgtaaattatgagaacggtcataa

SEQ ID NO: 37418 - DNA, 260 bp, Unknown; identical to SEQ ID NO: 37417
  Description of Unknown: RightRegion for integrase C161 sequence

SEQ ID NO: 37419 - DNA, 260 bp, Unknown
  Description of Unknown: RightRegion for integrase C162 sequence
atctcagaagatgggcagataagtgcaaaattcttagaggggactgaggtagaattataaagtagacaaaaggttgtaacaaaagtgggaaaccattgttgttacggccttttttcatattcttgtggtaaaatattaaaagacatttaggggatttaatcgctggaactcaagttttgatagaaaaatagattttaattatttgagttcaaatcttcaatttatttcaacaaatccccgtttatcgaacttagcaaact

SEQ ID NO: 37420 - DNA, 260 bp, Unknown
  Description of Unknown: RightRegion for integrase C163 sequence
ataggacttgatggagagattacggttcgattcctggaaggaactgaggtgggcttataaagtagatgaaaggctgtaatgacagtgggatgccattgttgttacagccttttttgcgtttttgtgatataatttagggagtattcattttagttatgaagagaaatatgagtaagattgtactttgtatttaatgatagtagcaaatctatgctactgaattttgaatagaaataatagttaattaagaatattaaaga

SEQ ID NO: 37421 - DNA, 260 bp, Unknown
  Description of Unknown: RightRegion for integrase C164 sequence
caaggtagccgcatattgccgagtgtccaccgaccaagacgaacagctatcaagttatgaaaaccaagttaattattaccgagattatatctccaaacacgaggactatgagttagttgacatctatgcggatgagggcatctcagcaaccaataccaaaaaacgtgatgcttttaaccggttgatacaagattgtagggctggtaaggtggataggattttggtcaagtcgatcagtcgatttgccagaaacacccttg

SEQ ID NO: 37422 - DNA, 260 bp, Unknown
  Description of Unknown: RightRegion for integrase C165 sequence
caaagtagccgcatattgtcgagtgtccaccgaccaagaagaacagctatcaagttatgaaaaccaagttaattattacagagagtttatctccaaacacgaggactatgagttagttgacatctatgcggatgagggcatctcagcaaccaataccaaaaaacgtgatgcttttaatcgcttgatacaagattgtaaggctggtaaggtggataggattttggtcaagtcgatcagtcgctttgccagaaacacccttg

SEQ ID NO: 37423 - DNA, 260 bp, Unknown
  Description of Unknown: RightRegion for integrase C166 sequence
caatgtggccgcatattgccgagtgtccaccgatcaagacgaacagctatcaagttatgaaaaccaagttaattattaccgagattatatctccaaacacgaggactatgagttagttgacatctatgcggatgagggcatctcagcaaccaataccaaaaaacgtgatgcttttaaccgcttgatacaagattgtagggctggtaaggtggataggattttggtcaagtcaattagtcgatttgcccgaaacacccttg

SEQ ID NO: 37424 - DNA, 260 bp, Unknown
  Description of Unknown: RightRegion for integrase C167 sequence
caaagtagccgcatattgtcgagtgtccaccgaccaagaagaacagctatcaagttatgaaaaccaagttaattattaccgagagtacatctccaaacacgaggactatgagttagttgacatctatgcggatgagggcatctcagcaaccaatacaaaaaaacgtgatgcttttaaccgcttgatacaagattgtagggcgggtaaggtggataggattttggtcaagtcaattagtcgatttgccagaaacacccttg

SEQ ID NO: 37425 - DNA, 260 bp, Unknown
  Description of Unknown: RightRegion for integrase C168 sequence
caaggtagccgcatattgtcgagtgtccaccgaccaagaagaacagctatcaagttatgaaaaccaagttaattattaccgagagtatatctccaaacacgaggactatgagttagttgacatctatgcggatgagggcatctcagcaaccaatacaaaaaaacgtgatgcttttaaccgcttgatacaagattgtagggccggtaaggtggataggattttggttaagtccattagccgatttgccagaaacacccttg

SEQ ID NO: 37426 - DNA, 260 bp, Unknown
  Description of Unknown: RightRegion for integrase C169 sequence
caaagtagccgcatattgtcgagtgtccaccgaccaagaagaacagctatcaagttatgaaaaccaagttaattattaccgagagtttatctctaaacacgaggactatgagttagttgacatctatgcggatgagggcatctcagcaactaataccaaaaaacgtgatgcatttaaccgcttgatacaagattgtagggctggtaaggtggataggattttggtcaagtcaatcagtcgatttgccagaaacacccttg

SEQ ID NO: 37427 - DNA, 260 bp, Unknown
  Description of Unknown: RightRegion for integrase C170 sequence
caaggtagccgcatattgtcgagtgtccaccgaccaagaagaacagctatcaagttatgaaaaccaagtaaattattacagagagtttatctccaaacacgaggactatgagttagttgacatctatgcggatgagggcatctcagcaaccaataccaaaaaacgtgatgcttttaaccgcttgatacaagattgtagggtaggtaaggtggataggattttggtcaagtcaatcagtcgatttgccagaaacacccttg

SEQ ID NO: 37428 - DNA, 260 bp, Unknown
  Description of Unknown: RightRegion for integrase C171 sequence
caaagtagccgcatattgtcgagtgtccaccgaccaagaagaacagctatcaagttatgaaaaccaagttaattattaccgagagtttatctccaaacacgaggactatgagttagttgacatctatgcggatgagggcatctcagcaaccaataccaaaaaacgtgatgcctttaaccgattgatacaagattgtagggctggtaaggtggataggattttggtcaagtcaatcagtcgatttgccagaaacacccttg

SEQ ID NO: 37429 - DNA, 260 bp, Unknown
  Description of Unknown: RightRegion for integrase C172 sequence
gtctttcctataaaaggtagaaaatatgaactgaaggttagaaaggagcacttcttatgaaaaacgtcataactattgaagcaaatgcgcctaggaactcagagttagctagcatttcgctacctaagaaacgtcgtgtagcaggttatgcgagggtatcaactgatcatgaagaccaaacaaccagctatgaatctcagatgaggtattatgcagaatacatttcaactcgaagcgattgggagtttgttaaaatgtac

SEQ ID NO: 37430 - DNA, 260 bp, Unknown
  Description of Unknown: RightRegion for integrase C173 sequence
agggttacaccagtaaaaggaaggaaatataccatagaaattagagaggggcgatattagtgaagaaagtaattactattgaggctacaccaactattattaggtcaagttcagatgatttcactttgaaaaagcgtagagttgcaggctatgctagggtatcaactgaccatgaagaccaagcaacaagctatgagtcacagatgcggtactactctgaatacattaatgggagggatgattgggaatttgttaaaatg

SEQ ID NO: 37431 - DNA, 260 bp, Unknown
  Description of Unknown: RightRegion for integrase C174 sequence
tgggttataccagtaaaaggaaggaaatatcctatagaaattagagaggggcgatattagtgaagaaagtaattactattgaggctacaccaagtattattaggtcaagttcagatgatttctctttgaagaagcgtagggttgcaggctatgccagggtatcaactgatcatgaagaccaagcaacaagctatgagtcgcagatgcggtattactcggaatacataaatgggagggatgattgggaatttgttaaaatg

SEQ ID NO: 37432 - DNA, 200 bp, Unknown
  Description of Unknown: RightRegion for integrase C175 sequence
attagccatgcatctgaacagatacaaatattgcaattaaaagcattagacaggtggtagaggtcttggtattatataatctttaggttctaaatttggaagggtggccgagcggctgaaggcggcggtttgctaaaccgttatacgacccaaaagtcgtatcgagggttcgaatccctctccttccgtatactgttttt

SEQ ID NO: 37433 - DNA, 260 bp, Unknown
  Description of Unknown: RightRegion for integrase A1 sequence
gagtggcgggggatgcggcgcatgcacgagcacagcgggaacgcgatgtttctgagttgagaggtccggggcgcgcctggccgcgcgaccccggtttgaggcgggccaaaaggcccacggacgggagcgaaaatgacacaagaacacaggctttacaactctgttgcgccgctgaggaacgtctcggcgctcgtgacactgatcgagaaggtgcgcgaccgcgcgcccggtttgccggggatggcgacattctcgggcta

SEQ ID NO: 37434 - DNA, 260 bp, Unknown
  Description of Unknown: RightRegion for integrase A2 sequence
gcgaaatccgcgaccgaagcccgccgccatatcgcgcatgaagagggcaaagccccggcgccagtcaacccgacggacaaggcgtatcaggcgcttgccgaggcttggaggcgggcgccggcggcggctcggcggcggttcctggaggagttcggccaggacgtgtcggagctgatgccgaagccggaggtcgccgccgaatgacgctgaccccgaccaaggaatggtggaccgccgccgaaatcgccgcccaggcactg

SEQ ID NO: 37435 - DNA, 260 bp, Unknown
  Description of Unknown: RightRegion for integrase A3 sequence
ggggcaggcccccgcgccgatgtcgccgaccgatcaagcctatacgcgtctgctcgacgcctgggaccgggcgccgaaggcggcgcgcaagcggttccttgaagggcggggcgatgccgtgcgcgaggtgctggacgatctggacgcggcttcgggcgctgagaacaccgtcaccttcctgccgcggagggacgagcgccatggctgagaccccgcgccaggaatggtggagcgcggccgagatcgccgcagcgggcctg

SEQ ID NO: 37436 - DNA, 260 bp, Unknown
  Description of Unknown: RightRegion for integrase A4 sequence
tcaagcaattgcaaaagaattagatgtaagcactgattacctcctaggcaattcgaattctacagtgtctgatgcacacgacctaaaaaagttcctagatcaaaacatgatattatttgacggtattccactgactgaggaagagatatctaggattaaaggatatcttgatgcactgatttctaggggaggtaagtaagatgttctctaattcccttgaggatttctttggtccggaagttgacatttatgcaagggta

SEQ ID NO: 37437 - DNA, 260 bp, Unknown
  Description of Unknown: RightRegion for integrase A5 sequence
aatttctgttatatatacaaaaaattattgcgacctacaagaaatacaagaattaaaacatattctatctcaaatgattatacataacttaaaaaacaaaaagaagaatgacgagtaatgttgtcattcttctttttttagattaatatttacatagataataaaatttatcgacaaagataataaaaagggtgagaaatatgtcagataaaaaacaagatatttatgctatttatattcgtgtatcaactgaacgacaa

SEQ ID NO: 37438 - DNA, 260 bp, Unknown
  Description of Unknown: RightRegion for integrase A6 sequence
agtggcgcgaagtggactggagccaggagaagcgcacccgcttcaccacgctgctcctgcgtcttctggcagaggatgacgaggacaccgaggagtgatagacggtggtccgactgtcacaaagtaggttagatttacatacagtcccacggaggcatcccggccaaggggtgcctccgttctgtgttaaggagacatcggtgagcaacactcttctgccggggcagagactgcgtcgtcgcatacgcgtcgccatctac

SEQ ID NO: 37439 - DNA, 260 bp, Unknown
  Description of Unknown: RightRegion for integrase A7 sequence
gcgggtggcgccgtgagcaacacgacctccgcctggaggacgagagagtggagcgaggccgagcgtgctcgcctcttccgtctcctcttcgggtcacaaacacagacgaaaactgggtgagtcaggtacactgacacaccgcacagcaacccctcgggctgatgctcggggggttcgtgcgttcaggggagggaagtgtcatggtgaagcgaactcttccgcgtcagcggatgaagcaggcgaccgtccgggtcgccatc

SEQ ID NO: 37440 - DNA, 260 bp, Unknown
  Description of Unknown: RightRegion for integrase A8 sequence
gcgggtggcgccgtgagcaacacgacctccgcctggaggacgagagagtggagcgaggccgagcgtgctcgcctcttccgtctcctcttcgggtcacaaacacagacgaaaactgggtgagtcaggtacactgacacactgcacagcaacccctcgggctgatgctcggggggttcgtgcgttcaggggagggaagtgtcatggtgaagcgaactcttccgcgtcagcggatgaagcaggcgaccgtccgggtcgccatc

SEQ ID NO: 37441 - DNA, 260 bp, Unknown
  Description of Unknown: RightRegion for integrase A9 sequence
agccagagccccatcgtcagcgtcgagtggcgcagaaccaagtggaccccggcccagcgcgagcgcctggcccgcatcctcctcgggccggtagcgaagaaggactgacccaggtacagttacatacggcgtgcacgcccctcgacccatgcggtcggggggcttcgtgcgtcctgctacctgagtccgaggggggacacatgcgaaccacgaccctgccgcgcaagcgcaagatgctgcgcgtcgccatctacctgcgc

SEQ ID NO: 37442 - DNA, 260 bp, Unknown
  Description of Unknown: RightRegion for integrase A10 sequence
ggtggcgccgtgagcaacacgacctccgcctggaggacgagagagtggagcgaggccgagcgtgctcgcctcttccgtctcctcttcgggtcacaaacacagacgaaaactgggtgagtcaggtacactgacacaccgcacagcaacccctcgggctgatgctcggggggttcgtgcgttcaggggagggaagtgtcatggtgaagcgaactcttccgcgtcagcggatgaagcaggcgaccgtccgggtcgccatctac

SEQ ID NO: 37443 - DNA, 260 bp, Unknown
  Description of Unknown: RightRegion for integrase A11 sequence
ccagaaccccatcgtcagcgtcgagtggcgcaaggccaggtggaccccggccgagcgcgaacgcctcgcccgcatcctcctcggacccgtcgccaagaaggactgacttcagctacagttacatacggcgcgagacgccccccgagccttctggccggggggcttcggcgtttctgtgtaagtggaactggagggggaccatgcgtaccaagacactgcctcgcaagaccaagacgctgcgggtggccatctacctgcgc

SEQ ID NO: 37444 - DNA, 260 bp, Unknown
  Description of Unknown: RightRegion for integrase A12 sequence
gaatatctgaatcattcgctggatattctggaacagaacagacgtaaaaaagccatttaattaacgtttaaacaaaatttaattacgaggttattcagatgaatatttccgatattcgcgcaggactgcgcacgcttgtagaaaatgaagaaaccacctttaaacaaattgctcttgagagcgggctttctaccggaactatcagtagttttatcaatgataagtacaacggggataacgagcgtgtttcacaaatgctg

SEQ ID NO: 37445 - DNA, 260 bp, Unknown
  Description of Unknown: RightRegion for integrase A13 sequence
gctgaattaaagaaacgaaaaatttcattacgttctttagggagacagaacggactttctcctcatacattaaaaaatgctttagataaatcctaccgaaatggcgaaatcattatcgcaaaggcgttgggaatgaagcctgaagatgtgtggccttcacgatatcaatcttttcataacgcagcttaagtgggtgggttatgactaattggtttacgacaaaagaattggttggacttccagggttgccagagcactct

SEQ ID NO: 37446 - DNA, 260 bp, Unknown
  Description of Unknown: RightRegion for integrase A14 sequence
gaatatctgaatcattcgctggatattctggaacagaacagacgtaaaaaagccatttaattaacgtttaaacaaaatttaattacgaggttattcagatgaatatttccgatattcgcgcaggactgcgcacgcttgtagaaaatgaagaaaccacctttaaacaaattgctcttgagagcggactttctaccggaactatcagtagttttatcaatgataagtacaacggggataacgagcgtgtttcacaaatgctg

SEQ ID NO: 37447 - DNA, 260 bp, Unknown
  Description of Unknown: RightRegion for integrase A15 sequence
gaatatctgaatcattcgctggatattctggaacagaacagacgtaaaaaagtcatttaattaacgttttaacaaaatttaattacgaggttattcagatgaatatttccgatattcgcgcaggactgcgcacgcttgtagaaaatgaagaaaccacctttaaacaaattgctcttgagagcgggctttctaccggaactatcagtagttttatcaatgataagtacaacggggataacgagcgtgttttacaaatgctg

SEQ ID NO: 37448 - DNA, 260 bp, Unknown
  Description of Unknown: RightRegion for integrase A16 sequence
ttcgagcaaggctggcggaaaggtcttgaaatgattaaacaggaaaagggcattaaataggagaaatcaaatgagcttaattaaccaaatcaatgcaattaaagcatcaggaaatattagtcaacgtgatattgcacagcaaattggcatttcagcaggtgcattgagtgcttatttaaagggtaattatgcaggcaatatcgacaacatcgagagtgcactcacgaactggcttgcgacacaagaaaagaaagaaaaag

SEQ ID NO: 37449 - DNA, 260 bp, Unknown
  Description of Unknown: RightRegion for integrase A17 sequence
gccttgagccagagccccatcgtcagcgtcgagtggcgcaagaccaagtggacccccgccgagcgggaacgcctcgcccgcatcctcctcgggccggtggcgagtaagacctgaccccaggtacagttgcacacggcgcctacgccccccgagccttctggccggggggtttcggcgtatctggatccaggagggggatcatgggagccaagacgctcgcccgcaagcgcaagaccctgcgagtcgccatctacctacgc

SEQ ID NO: 37450 - DNA, 260 bp, Unknown
  Description of Unknown: RightRegion for integrase A18 sequence
aagtacggattcaacgatgcgatggaaagacacctgaagaagttcaaaggcgaggcatgaaaaaacccgggagcggcaactcccgggctcaaagtggccctcaggccaatcactactcagaaaggcaaggataacacatgacaaaagagcagcgaaaaaccatgaaagccaaacgcaacgaagccctggcggatgccgtcgaacagatcattgccgatgagagcttgacccaggcctcggtttccaagctgaccaacatc

SEQ ID NO: 37451 - DNA, 260 bp, Unknown; identical to SEQ ID NO: 13144
  Description of Unknown: RightRegion for integrase A19 sequence

SEQ ID NO: 37452 - DNA, 260 bp, Unknown
  Description of Unknown: RightRegion for integrase A20 sequence
cagaacttcagccaaagcgtttcaaacctgtttgaacagaaattcaaaaacaagctttaaaccctatttaaaccttccataaatggagattgatatgagtacaaacgtagttgaactaggcaatgcagaggctaagcaaaccgacacattaatgcgcattcgtgcattaacagaatcgaaggctgtttcagcgtctcagattgcaaaagagatcagcgtatcacctgccacgctaagccaaattttgaacggttcataca

SEQ ID NO: 37453 - DNA, 260 bp, Unknown; identical to SEQ ID NO: 37452
  Description of Unknown: RightRegion for integrase A21 sequence

SEQ ID NO: 37454 - DNA, 260 bp, Unknown
  Description of Unknown: RightRegion for integrase A22 sequence
gaagatttaaatataagtttggacaatgataagcaagttgagtgtgttgtattgatgtaaaaagttgcacccactaagtaaataaagtgtagaaaataagggcttattctaaggctatcgttaaaaggtatcggtagcttggagtaagccttattagttgagagaaaataaggttgagtaggaacatatctatagatgagagttgacactagggaatggataacaagaaaaaatgcacccacttgcacccagctaaaaat

SEQ ID NO: 37455 - DNA, 260 bp, Unknown
  Description of Unknown: RightRegion for integrase A23 sequence
ccgaaggtcgaggaagagacggagccggagacgctgaacgggttcacagcggcggcgtgacggcggcaccagcgcaacgggaaggggcttcggccccttttctcgtgcccggcgtcggttcgttgccctaagcaactgttcctagcgtcacgtcagcgccggaccggcaggcttcccacctgggcaaagagacgtagtgacggagttacgtcacttctgaattcctataagacatctctataagcaatccggaagtgacg

SEQ ID NO: 37456 - DNA, 260 bp, Unknown
  Description of Unknown: RightRegion for integrase A24 sequence
atccattgggcaaagccgtctgaagacgcccaggaagagccggagacgctagcggcgtagctgggcacccccggagcctgtacggcgctcagacgggcgctcagcgggcttctcagggcagcgggaagggtcggccggatcgccggtcggccttctctcgtgtctcgtggtcgttagttagcctaagtaacagtgactccgtcaccacagcacagcggggcgccccgtctgacctgggcaaagtgatgaagtgacgtagt

SEQ ID NO: 37457 - DNA, 260 bp, Unknown
  Description of Unknown: RightRegion for integrase A25 sequence
ccgccgaccgacgacgacgaagacgacgcccaggacggcacggaagacgtagcggcgtagcgagacacccgggaagcctgttaggcgctgagacgggcgcacagcgggcttcctggggcagcgggaagggtcggccggtcccccggtcggcccatttctcttgtctcggtttagttagttagcctaagtaacagtgactccgtcaccacagcacagcggggcgagccgttgacctgggggaagtgatgctgtgacggaat

SEQ ID NO: 37458 - DNA, 260 bp, Unknown; identical to SEQ ID NO: 13018
  Description of Unknown: RightRegion for integrase A26 sequence

SEQ ID NO: 37459 - DNA, 260 bp, Unknown
  Description of Unknown: RightRegion for integrase A27 sequence
ctgctgaaggaggaagacgaagcgagcgaagccactgagcgggagcttgcggcgctgtagcgcacagcgggaggggtcgagccggcggacggttcggccccttttttggccttgaaatcgttagttaggctaactagtagttccttcgtcaccacagcgggcagggagcgcccttctgacctgggatgagtgacgtagtgacgaaatgactcatacctaggattcacataagcattctctataggtaatccggactcgac

SEQ ID NO: 37460 - DNA, 260 bp, Unknown
  Description of Unknown: RightRegion for integrase A28 sequence
aatacgaggccgccggtggaggagatggtgcgtatcgtgttcggtcctgtggggggatgatgggatggatttccccgcgccttgtggcttggggaaatccatccagggggttatgtgaaatctgttcgcagaatttcgcgttctggggtgcggttcagaacgagaccgtgatcagcaaaaattcgagttaatgaggcgatctcgccggcgttgaggtgttcacctatggcgtgggagatctcccgacaggtagtgccctc

SEQ ID NO: 37461 - DNA, 260 bp, Unknown
  Description of Unknown: RightRegion for integrase A29 sequence
ccgattgaagagcgcgtcacgatcgaatgggcgaagccggcggaggggtcagcggcgtaagcccacagcgggaagggggccgatccttcggggtcggtcctctttttgtgccttcggatcgttagttaggctaagtagttatcatcccgtgaccactcccctacacgagcccccttgagaatccccttcctgacctgggcttgtgcactagtgcagatttgtacttgatcttgataccaccatagaaaagctatagagaa

SEQ ID NO: 37462 - DNA, 260 bp, Unknown
  Description of Unknown: RightRegion for integrase A30 sequence
ccgattgaagaccgggtcaagatcgaatgggctaagccggcggaggggtcagcggcgtaggggcacagcgggaaggggtccgatccttcgggtcgggcctctttttgtgccttcggatcgttagttaggctaagtagttatgatcctgtgacactctcctgcacggcttcgcctgagaatcccctacctgacctgggctaatgctctagtgcagatttgtacttgatcttggaaacacaatagaaaagctatagagaaac

SEQ ID NO: 37463 - DNA, 260 bp, Unknown
  Description of Unknown: RightRegion for integrase A31 sequence
tcgcaacgcgtctcggccgaccagctcaccaacgccgataacgccggctacatgcgcgccctcgaccacgtcgcgcgcggcctgctcgacgtaccccccgcaccgcgccgcggtggcaaccgggaccgcgacgagcaggtcgcgggcaacgtgatcacactgcgcccgcacaaccccgaccgatgcgaacggaaggcacagtgagcactctgtatctaccgccccagtaccaggggccgccggatgccggcgacctctgg

SEQ ID NO: 37464 - DNA, 260 bp, Unknown
  Description of Unknown: RightRegion for integrase A32 sequence
gttccgattgaagagcgcgtcaagatcgaatgggcgaagccggcggagtcagcggcgtagcccaggacagcgggaaggggtccggtccttcggggtcggacctctttttgtgccttcaagtccttagttaggctaactagttatccttccgtgacactctcctacacgagcccccgtgggaatccccttcctgacctgggcttgtgcactagtgcagttttgtacttgatcttgataccaccttagaaaagctatagaga

SEQ ID NO: 37465 - DNA, 260 bp, Unknown
  Description of Unknown: RightRegion for integrase A33 sequence
ccggaaacggttgtgttccgcaatgggctgtcccatacattcacttataaggattcttaatgtaaaaatacccaggagcatttacactcctgggtttctctttgtcccattatttacttttcctgatttctgggataacctcacatttgttagatttggaggctacacaatcatcatagcatcccgtatgattacgggtgtaccaccatttctaacatttgttagatttttactggttctcggaatgctcatatgtattc

SEQ ID NO: 37466 - DNA, 260 bp, Unknown
  Description of Unknown: RightRegion for integrase A34 sequence
cataaagaaacccccacatgtggaggctattgtgttgctcatcaaatagtagcgaagtaaaaaagtgagacgcaaatttgagcgtctcactctttttttatttcaagatatcatttaaggactcagtgattgtaggatgagtatagatacgatcacacaacacacgataatcgagttttaaatccatggcaagcgttattaagttaatcatttcatgggattcaatcccaaagagagaagcaccaatgatttgatttgtg

SEQ ID NO: 37467 - DNA, 260 bp, Unknown
  Description of Unknown: RightRegion for integrase A35 sequence
agaggaaacttaaataacaaaataaatacccttttaatatacacagaaggcattctatagctaacttaagtaaccagatataactataacttttattgtttaataacatttgtgccattctctctaacttgagcttatggtttaaagtacttaatgaccaagagcataattattactacaaataggtggtcttaggctttcaagatgactatttactttcagcaaatcgtccaaatcatgctctattttttgtgttttta

SEQ ID NO: 37468 - DNA, 260 bp, Unknown
  Description of Unknown: RightRegion for integrase A36 sequence
cagatcaccgacgaccagctcgccgaagcgcaccaggccggctacgcgctggccctccaccacgttgcgcgcggcctgctcgtcccggacccggccccgccgacccccggccaccaccaggacgacgagcagaccccgggcaacgtggtgcaactgcaccgcagcccgaccaacacccccaaggagaaacggaaggcacagtgaccagcctgtacgtacccccggcgtccgccgccctgcgcggcgaactgccctgggtg

SEQ ID NO: 37469 - DNA, 260 bp, Unknown; identical to SEQ ID NO: 37468
  Description of Unknown: RightRegion for integrase A37 sequence

SEQ ID NO: 37470 - DNA, 260 bp, Unknown; identical to SEQ ID NO: 13741
  Description of Unknown: RightRegion for integrase A38 sequence

SEQ ID NO: 37471 - DNA, 260 bp, Unknown
  Description of Unknown: RightRegion for integrase A39 sequence
cagatcaccgacgaccagctcgccgaagcgcaccaggccggctacgcgctggcccttcaccacgttgcgcgcggcctgctcgtcccggacccggccccgccgacccccggccaccaccaggacgacgagcaggccccgggcaacgtggtgcaactccgccgcagcccgaccgacacccccaaggagaaacggaaggcacattgaccagcctgtacgtcccgccgtccttcacgggcggcccgccgcccgatgacctcccc

SEQ ID NO: 37472 - DNA, 260 bp, Unknown
  Description of Unknown: RightRegion for integrase A40 sequence
acgcggaatttcttacgggctggtttagctgcgctagccatgtcgataatcctgttgagtggtttctgtacggccatgatggcagagcgtaacttgctgtctcaacgaggttttgttgtcggaggaaggccagaccataaagggggcgatagcgggatcgcgcgcggggtaatcttcactccataaacggtggagggcagatgatacaggacacttttgtacgtcagagggcaaaacaactttactggcagggctacccg

SEQ ID NO: 37473 - DNA, 260 bp, Unknown
  Description of Unknown: RightRegion for integrase A41 sequence
gaccacgcgtaccgcgccggataccaccgcgcgctcacccacgtgtcacaaggacttctcgacgccccggcggcaccgccggacggcggcgaggaagtcgggcagtacgacgcgcagggcaacgccctatgcgacgacgacctgctcgacaatgtgcggccactccggccgcacggaaacgccaacccacggaaagcggtatgaaactagacataccaagcacattccacggctcgcgcacatttggcgagccgtggctc

SEQ ID NO: 37474 - DNA, 260 bp, Unknown
  Description of Unknown: RightRegion for integrase A42 sequence
cacgagagggtcaagatcgagtggcatcggcccacggaggaggtagacctggtggcgtaggccacactgtacacacgagagggtctctgctcacatgagcgggggccctttcttcttgccctttaggtcacggaacggtaacggccccgtgggcccgggtgacgttcggcggggccgatgacgctcagcgggcggggacggggctcccgcaccccctctgacctgcaagaatgatggcagtgacgattgagatagtgatc

SEQ ID NO: 37475 - DNA, 260 bp, Unknown
  Description of Unknown: RightRegion for integrase A43 sequence
gacccgacacccatagaagaccgactcattttcgattggctgagcggggtgccagcgtgactacgcgaacgtgttaccggtgcaaggaagtcaagccgctggaagagttcccccgggcggcaagcaagcccaaagggcatgactacctgtgtaagccgtgcaaggtggtggttgagtctgagcggaagcgacagacgccgggcttgcaggcggaagcgtcccgggctcagcgggcaggcatcaggctcaacaagtgcgct

SEQ ID NO: 37476 - DNA, 260 bp, Unknown
  Description of Unknown: RightRegion for integrase A44 sequence
cgcctcgccctcgaacacgtcgctaagggcctgctcagcaggaaatccgcaccgcccgacggcgggacacgcgtcgagccagtcgacgaccgcgcgaccctcgaccccgacctcggcggcggagccgcgggccccgttgtccccagcaacgtgcgcccgctccggctcatccgccacgaccacgacgaacggaagatcgtatgacccttcccgacatcccacccacgttccacggctcggcgcacgccggcgagccgtgg

SEQ ID NO: 37477 - DNA, 260 bp, Unknown
  Description of Unknown: RightRegion for integrase A45 sequence
ctcgccctcgaacacgtcgctaagggcctgctcagcaggaaatccgccccgccggacggcgggacgcacgtcgagccggtcgccgaccgcgccactctcgacggcgaccgcgccgccggcggaaccgcggggcccgttgtccccaacaacgtgcacccgctgaggctcatccgcccagaccacgacgaacggaagatcgtatgacccttcccgacatccccgctacgttccacggttcgcccctcgcgggcgagccgtgg

SEQ ID NO: 37478 - DNA, 260 bp, Unknown
  Description of Unknown: RightRegion for integrase A46 sequence
aatcaactaaaaaggctgtgaaacagctcctagagttaaatttaataaataatgttgaagatctatttaaaggtcagtatgaaccaggtactttagaggaattattaattacagctttaaaagcagatatatcatatttactcaataatgaaaaataaagtttttttatttataaatatagtatgaaagggatgttaaatgtgaagaaatcagctatatacataagagtttccacgcatcatcaaatcgataaggattcg

SEQ ID NO: 37479 - DNA, 260 bp, Unknown
  Description of Unknown: RightRegion for integrase A47 sequence
gacctcgatccctcgctcatcccaagcgacgggctgccgatgcttcctctcgacgcctgatactctcgcctaggcgggtcgttcgaccaagctggttcgccagtcgccaacgaacccgaaggtaggtgctggcttcgattccgaaaaccagaaatccgtgaaagcagcgacgtctggcgcaaggtaccaatacgcgtgcccgtcagcatccatagcccaccatcgagcgcttttcggcgcctgcttccagtcgatctcag

SEQ ID NO: 37480 - DNA, 260 bp, Unknown
  Description of Unknown: RightRegion for integrase A48 sequence
ccgagggatgacgacatgagaggggccctcggaatgacaggagcccccctggccgattagaggtcaaccagggaggcgtgcaaccacacggatctaaggagcagttgcatggcaatcgtaaccccgtcgcgtgcggcgacggcaggcacaatcgcggtcggtgggctctcgttcgcgctgtcgttcacggcgctgagagagctgtcggcggccaacggagtggcccaggcatggatggtgcccctggtggtcgacggagg

SEQ ID NO: 37481 - DNA, 260 bp, Unknown
  Description of Unknown: RightRegion for integrase A49 sequence
agttacgaatgaagaatatataaatactcgcgaagattttaaaagttttaaattggcattagagcaacttataaatctaaaaatgattacttcagctgaagatttatttaaggattttaaaggtaatgcagctgaggaattgcttgttgctgcacttaaagctgatgttgaaggtataatgttaaaaaaggagaatacaaatgaaaaagatgaaaattaaaatagcaatctatgtaagggtatccacacaccatcaagta

SEQ ID NO: 37482 - DNA, 260 bp, Unknown
  Description of Unknown: RightRegion for integrase A50 sequence
aacgagttcttcgcccagggcgctgaagagcttgagggcatcgcacgcgccgaagcgtgacagcggaaggggtcgttccttcgggggcgaccccatttcgtgcgccttgagattgttagttaggctaactagtagttccttcgtcacgacagcgggcagggatcaggcttctgacctgggagaagtgatgttgtgacgctgtgatccaaactcaggattcacataagagcttctataggcaatccggatcttgagccact

SEQ ID NO: 37483 - DNA, 260 bp, Unknown; identical to SEQ ID NO: 24467
  Description of Unknown: RightRegion for integrase A51 sequence

SEQ ID NO: 37484 - DNA, 260 bp, Unknown
  Description of Unknown: RightRegion for integrase A52 sequence
aggctcaggtcatctgcgtgtgctcgcgaaaccgcactgagcatcatcgcaaattcgactttcactgcacggcgccacgcggcgccgtttttttatgcccggctttcgcgcgcggagaaatatacattcgttgtgtcaggggcagcctagtgatatgaaatgtatacttttcgcttttgtcatgttactcaggcagcaccgtgcaggaaaaacccaaagtttacagctacttacgtttcagcgatccgaagcaagctact

SEQ ID NO: 37485 - DNA, 260 bp, Unknown
  Description of Unknown: RightRegion for integrase A53 sequence
ccgagggatgacgacatgagaggggccctcggaatgacaggagcccccctggtcgattagaggtcaaccagggaggcgtgcaaccacacggatctaaggagcagttgcatggcaatcgtaaccccgtcgcgtgcggcgacggcaggcacaatcgcggtcggtgggctctcgttcgcgctgtcgttcacggcgctgagagagctgtcggcggccaacggagtggcccaggcatggatggtgcccctggtggtcgacggagg

SEQ ID NO: 37486 - DNA, 260 bp, Unknown
  Description of Unknown: RightRegion for integrase A54 sequence
ccgaaggacgttcggactcgcctggtcattcggccagacgacttcggacagaccttctgagaacgcaaaaagcccccagtcgatgagtgactgggggctctgcgttacagcttgctcgggtcgtacgggatctcctcgtcaccgtcgatgatgacgacctcgatctcgatcacggggcgacgcgaccgtgccgctggaacgcgccccaggtgaggggcatgtcctgatggaggaagtcctccatcttctcggcggccatc

SEQ ID NO: 37487 - DNA, 260 bp, Unknown
  Description of Unknown: RightRegion for integrase A55 sequence
ccgaaggacgttcggactcgcctggtcatacggccagacgacttcggacagaccttctgagaacgcaaaaagcccccagtcgatgagtgactgggggctctgcgttacagcttgctcgggtcgtacgggatctcctcgtcaccgtcgatgatgacgacctcgatctcgatcacgggccgacgcgaccgtgccgctggaacgcgccccaggtgaggggcatgtcctgatggaagaagtcctccatcttctcggcggccatc

SEQ ID NO: 37488 - DNA, 260 bp, Unknown; identical to SEQ ID NO: 25647
  Description of Unknown: RightRegion for integrase A56 sequence

SEQ ID NO: 37489 - DNA, 260 bp, Unknown
  Description of Unknown: RightRegion for integrase A57 sequence
gaccacgcgtaccgcgccggataccaccgcgcgcttacccacgtgtcacaaggacttctcgacgccccggcggcaccgccggacggcggcgaggaagtcgggcagtacgacgcgcagggcaacgccctatgcgacgacgacctgctcgacaatgtgcggccactccggccgtatgaaaacaccaacccacggaaagcggtatgaaactagacataccaagcaccttccacggctcgcgcacattcggcgagccgtggctc

SEQ ID NO: 37490 - DNA, 260 bp, Unknown
  Description of Unknown: RightRegion for integrase A58 sequence
ccgaaggacgttcggactcgcctggttattcggccagacgacttcggacagaccttctgagaacgcaaaaagcccccagtcgatgagtgactgggggctctgcgttacagcttgctcgggtcgtacgggatctcctcgtcaccgtcgatgatgacgacctcgatctcgatcacggggcgacgcgaccgtgccgctggaacgcgccccaggtgaggggcatgtcctgatggaagaagtcctccatcttctcggcggccatc

SEQ ID NO: 37491 - DNA, 260 bp, Unknown
  Description of Unknown: RightRegion for integrase A59 sequence
ccgaaggacgttcggacacgcctggtcatccggccagacgacttcggacagaccttctgagagaacgcaaaaagcccccagtcgatgagtgactgggggctctgcgttacagcttgctcgggtcgtacgggatctcctcgtcaccgtcgatgatgacgacctcgatctcgatcacggggagacgcggccgtgccgcatgaaggcggaccaggtgatgggcatcgcgtcggcgaagacctcctccatctcgtcggccacca

SEQ ID NO: 37492 - DNA, 260 bp, Unknown
  Description of Unknown: RightRegion for integrase A60 sequence
ccgaaggacgttcggacccgcctggtcattcggccagacgacttcggacagaccttctgagacaacgcaagaagcccccagtcgagaggtgactgggggcttcgttgttagagcttgctcgggtcgtacgggatctcctcgtcaccgtcgatgatgacgacctcgatctcgatcacggggccactcggccgtgccgctggaacgcgccccaggtgtggggcatgtcgtgctggaagtagtcctccatcttctcggcggcc

SEQ ID NO: 37493 - DNA, 260 bp, Unknown
  Description of Unknown: RightRegion for integrase A61 sequence
agccctcctggatttataaagtatttacaatgaatttagatgaactaattataacccatgttcaagaaggtttttcataaaatttcaatcaattcaattccttcaaattattgtattgttttcgtattcaatgtcagataaaatattcttaattaagtttctgttttgacattaaacacaaataaagaggtgctaaatttttggagttaaaaaacattgttaattcttacaacatcacaaatattttagggtatcttaga

SEQ ID NO: 37494 - DNA, 260 bp, Unknown
  Description of Unknown: RightRegion for integrase A62 sequence
caaccgaaagcggaccaaccccagccctcatttcaacttcaactttttggttcacagaatgattgagccaaagcaccgcgacgcatggaaggccagacgatgacgcacgccgatccacggttacttgcatttgtccgagctttggcgaaagctgatgcgcgtcgcgatagggcgctggcagcggcaaatagtgaggaagtatgcaaaacaacagagcagccatttatgcgaggttctcaactgatctccaaaacgagcgg

SEQ ID NO: 37495 - DNA, 260 bp, Unknown
  Description of Unknown: RightRegion for integrase A63 sequence
ccctgggcggaggagccggacgccggggaggactacggcggggagacagcggcagagtgagtatttattgagaattgtttgaccttctaatccagctatacgcctcctctcctcctctctacagcgtcaccagccaggtcaaacagttctccttatcgcccctcaccaggggaggttctctccggacccccaggtgaggggcgacgtgcgtcccagggaggagacacccccgatgacctacgaagaggagtgcgcacact

SEQ ID NO: 37496 - DNA, 260 bp, Unknown
  Description of Unknown: RightRegion for integrase A64 sequence
ccgaaggacgtgcgtcagcgcctggtcatccggccggacgactttggcgacacgttctgacccagaacgcacgaaagcccccagtcgagtgatgactgggggcttcgttgttagagcttgctcgggtcgtacgggatctcctcgtcaccgtcgatgatgacgacctcgatctcgatcacggggccactcggccgtgccgctggaacgcgccccaggtgtggggcatgtcgtgctggaagtagtcctccatcttctcggcg

SEQ ID NO: 37497 - DNA, 260 bp, Unknown
  Description of Unknown: RightRegion for integrase A65 sequence
ccgaaggacgtgcgtcagcgcctggtcatccggccggacgacttcggcgacacgttctgacccagaacgcacgaaagcccccagtcgagtgatgactgggggcttcgttgttagagcttgctcgggtcgtacgggatctcctcgtcaccgtcgatgatgacgacctcgatctcgatcacggggccactcggccgtgccgctggaacgcgccccaggtgtggggcatgtcgtgctggaagtagtcctccatcttctcggcg

SEQ ID NO: 37498 - DNA, 260 bp, Unknown
  Description of Unknown: RightRegion for integrase A66 sequence
ccgaaggacgtgcgtcagcgcctggtcatccggccggacgacttcggcgacacgttctaacccagaacgcacgaaagcccccagtcgagtgatgactgggggcttcgttgttagagcttgctcgggtcgtacgggatctcctcgtcaccgtcgatgatgacgacctcgatctcgatcacggggccactcggccgtgccgctggaacgcgccccaggtgtggggcatgtcgtgctggaagtagtcctccatcttctcggcg

SEQ ID NO: 37499 - DNA, 260 bp, Unknown
  Description of Unknown: RightRegion for integrase A67 sequence
tctcctgtctggcgtacgactgccggacgcggcgagcctcagctctctgccgttcagtgaagctgggcatggtggcccgagcctgagccacccactcctctcgggtcacccgatccgctcctcgttgagcatccggctgatctcgtcgcggaggtgatcgttctcggctgcctcacggaggagcaggaggcggaggtcaccgatgactccttgcgcccacacggggagcttcttcgtgcgctcggagtcgaacagcttgg

SEQ ID NO: 37500 - DNA, 260 bp, Unknown
  Description of Unknown: RightRegion for integrase A68 sequence
ataaaattcattccatagttctagatgaaaatagatataaacgtattagatctgcattaatgaaaaaggaagtctcatataatagttgtgaaatatagtattttccctactactttttaataaatatatgtagttatactcaattaacttaacttatttataaaactacaatcaatgtataaacactttggaggtatactatgaaagcagctatttattcaagaaaatcaaaattcactggtaaaggtgaaagtgtagaa

SEQ ID NO: 37501 - DNA, 260 bp, Unknown; identical to SEQ ID NO: 37497
  Description of Unknown: RightRegion for integrase A69 sequence

SEQ ID NO: 37502 - DNA, 260 bp, Unknown
  Description of Unknown: RightRegion for integrase A70 sequence
gccaatggcaagcgcgccattgtcaccctgcgcgccggaaagtggcgcgccgaaccctgaaggactgtctatgtattacgaaaacaagtcgtatcttatcggatgcttggggcaggaccccgagattcggacattccagaacggcggcaaggtggcgaacctgcgcattgccaccacccgccggtggaagtccaagaacacgggcgaggtgcaggaagaaaccgaatggcattcggtcgctgtgaccaatgaggcccttg

SEQ ID NO: 37503 - DNA, 260 bp, Unknown
  Description of Unknown: RightRegion for integrase A71 sequence
gccaatggcaagcgcgccattgtcaccctgcgcgccggaaagtggcgcgccgaaccctgaaggactgtctatgtattacgaaaacaagtcgtatcttatcggatgcttggggcaggaccccgagattcggacattccagaacggcggcaaggtggcgaacctgcgcattgccaccacccgccggtggaagtccaagaacacgggcgaggtgcaggaagaaaccgaatggcattcggtcgttgtgaccaatgaggcccttg

SEQ ID NO: 37504 - DNA, 260 bp, Unknown
  Description of Unknown: RightRegion for integrase A72 sequence
caaattgttgcagttatagcgaacggagaagaaggatcgttgaagcgcatgagatggagcgaaggttctccatatatagaattaataccggaaaattccgaatataatattatgagacatctccctcatgaaatcatagtctgcggagtgtatgtgggacactttaaaccagactttagagcagataaggagtcttgaaaatgagtaatgaatattgtatgtatcttcggaaatcacgagctgatgcagaggcggaagcg

SEQ ID NO: 37505 - DNA, 260 bp, Unknown
  Description of Unknown: RightRegion for integrase A73 sequence
ctgaggctgggcgcggctctatacctcgtaaacgcagaaaagccccctacgggccgctagggctcgcagagggcttctccggtagtctctattcagttgtactgctgagtccgtcagcgtgggcgctagaggggtttatggggcctcgtggacccgcacgtacggctgcagaggcttgtcacggtaggcgtggtagcgctctttctcgtcggagatcgacttgagaagctcgctgtcgatatgctcccgcacgaccttca

SEQ ID NO: 37506 - DNA, 260 bp, Unknown
  Description of Unknown: RightRegion for integrase A74 sequence
tacgagcagcatctcaggctcggtagcgtggtcgaacggctacacgccgggatgtcgtagagcgactaccccgagaacgcagaaaagccccctacgcgccgtgtaagggcacgcagagggctctctggtagtctctattcagttgtggggttgcgtccgtcagcgtggacgctagaggggtttacggggcctcgtggatccgtacgtacggctgcagaggcttgtcacggtaggcgtgatagcgctcggcctcctcgacg

SEQ ID NO: 37507 - DNA, 260 bp, Unknown
  Description of Unknown: RightRegion for integrase A75 sequence
tacgagcagcatctcaggctcggcagcgtggtcgaacggctacacaccgggatgtcgtagagcggctacccggagaacgcagaaaagccccctacgcgccgtgtaagggcacgcagagggctctctggcagtctctattcagttgtggggttgcgtccgtcagcgtggacgctagagggtatttcggggtggtgcagcatgtccggtgacttgtccgagtagcagatggagctgcctaggtgagcaacccatcgaaaccc

SEQ ID NO: 37508 - DNA, 260 bp, Unknown; identical to SEQ ID NO: 37507
  Description of Unknown: RightRegion for integrase A76 sequence

SEQ ID NO: 37509 - DNA, 260 bp, Unknown
  Description of Unknown: RightRegion for integrase A77 sequence
ctgaggctgggctcggctctagacctcgtaaacgcagaaaagccccctacgggccgctagggcacgcagagggctctctggtagtctctattcagttgtactgctgagtccgtcagcgtggacgctagaggggtttacggggcctcgtggacccgcacgtacggctgcagaggcttgtcacggtaggcgtggtagcgctcggcctcctcggcgcggatggcctcgatctcctgagccgcgctcaccttacgacgctgcag

SEQ ID NO: 37510 - DNA, 260 bp, Unknown
  Description of Unknown: RightRegion for integrase A78 sequence
tacgagcagcatctcaggctcggcagcgtggtcgaacggctacacaccgggatgtcgtagagcggctaccccgagaacgcagaaaagccccctacgcgccgtgtaagggcacgcagagggctctctggtagtctctattcagttgtggggttgcgtccgtcagcgtggccgctagagggggtttacggggcctcgtggacccgcacgtacggctgcagaggcttgtcacggtaggcgtgatagcgctccgcctcctcggc

SEQ ID NO: 37511 - DNA, 260 bp, Unknown
  Description of Unknown: RightRegion for integrase A79 sequence
ctgaggctgggctcggctctggacctcgtaaacgcagaaaagccccctacgggccgctagggctcgcagagggcttctccggtagtctctattcagttgtgggtgtgcgtccgtcagcgtggacgctagaggggtttacggggcctcgtggacccgcacgtacggctgcagaggcttgtcacggtaggcgtggtatcgctcggcctcctcggcgcggatggcctcgatctcctgagccgcgctcaccttacgacgctgca

SEQ ID NO: 37512 - DNA, 260 bp, Unknown
  Description of Unknown: RightRegion for integrase A80 sequence
cccagcgatgtgcgtgagcgcctggtcatgcggcgcgacgacttcgccgaggcgttctgagacacaacgcaaaaagcccccgtcctcgaagtgaggcgggggcttttcgttgttgggttacagcagctcggggtcgtaggggatgcggttgccgtcctggtcgatgatccagacgcgaacggtgatcacggggcgacgcgaccgtgacgctggaacgcaccccaggtgaggggcatgtcctggtggaagaagtcctccat

SEQ ID NO: 37513 - DNA, 260 bp, Unknown
  Description of Unknown: RightRegion for integrase A81 sequence
ccgaaggacgtgcgtgagcggctgatcgttcgagaggatgacttcgccgagacgttctgatccacaacgcaagaagcccccgtcctcgaagatgaggcgggggcttcgttgtgcgctacagcagctcggggtcgtactcgatccgttcaccgtcttcggtgacgatccagacgcggatctcgatcacggggctacccgcccgttcatctcgaaggcgaggtgagtgaccggcatcgtgtcgatgaaggcgacctccatct

SEQ ID NO: 37514 - DNA, 260 bp, Unknown
  Description of Unknown: RightRegion for integrase A82 sequence
actcctgtctggcgtaagcgaggcgacgtcgccggatcgactccctctgctgcggagtgacgggcggggctgaggctcgggccttggccacccactcctcgcgggtcactcggcacgctcccgttcgagcaggcgactgatgtcctcgcggaggtagtcgttctcggtggcttcccgaaggaggagcatccggaggtcggtgatcacggcccgagcccagaccgggagcttgtccagccgctcggactcgaacagcttgg

SEQ ID NO: 37515 - DNA, 260 bp, Unknown
  Description of Unknown: RightRegion for integrase A83 sequence
tacgagcagcatctcaggctcggcagcgtggtcgaacagctacacgccgggatgtcgtagagcggctacccgagaacgcagaaaagccccctacgcgccgtgtaagggcacgcagagggctctctggtagtctctattcagttgtgaggtcgcgtccgtcgcgtggacgctagaggggtttacggggcctcgtggacccgcacgtacggctgcagaggcttgtcacggtaggcgtggtatcgctcggcctcctcggcgcg

SEQ ID NO: 37516 - DNA, 260 bp, Unknown
  Description of Unknown: RightRegion for integrase A84 sequence
tacgagcagcatctcaggctcggcagcgtggtcgaacagctacacaccgggatgtcgtagagcggctacccgagaacgcagaaaagccccctacgcgccgtgtaagggcacgcagagggctctctggtagtctctattcagttgtggggttgcgtccgtcagcgtggacgctagaggggtttacggggcctcgtggacccgcacgtacggctgcagaggcttgtcacggtaggcgtgatagcgctcggcctcctcggcgc

SEQ ID NO: 37517 - DNA, 260 bp, Unknown
  Description of Unknown: RightRegion for integrase A85 sequence
tacgagcagcacctccggctcggtagcgtggtcgaacagctacacaccgggatgtcgtagagcgactacccggagaacgcagaaaagccccctacgcgccgtgtaagggcacgcagagggctctctggtagtctctattcagttgtggggttgcgtccgtcagcgtggccgctagagggggtttacggggcctcgtggacccgcacgtacggctgcagaggcttgtcacggtaggcgtgatagcgctccgcctcctcggc

SEQ ID NO: 37518 - DNA, 260 bp, Unknown
  Description of Unknown: RightRegion for integrase A86 sequence
tacgagcagcatctcaggctcggcagcgtggtcgaacggctacacaccgggatgtcgtagagcggctacccggagaacgcagaaaagccccctacgcgccgtgtaagggcacgcagagggctctctggcagtctctattcagttgtggggttgcgtccgtcagcgtggacgctagaggggtttacggggcctcgtggatccgtacgtacggctgcagaggcttgtcacggtaggcgtgatagcgctcggcctcctcgacg

SEQ ID NO: 37519 - DNA, 260 bp, Unknown
  Description of Unknown: RightRegion for integrase A87 sequence
tacgagcagcatctcaggctcggcagcgtggtcgaacggctacacgccgggatgtcgtagagcggctacccgagaacgcagaaaagccccctacgcgccgtgtaagggcacgcagagggctctctggtagtctctattcagttgtgggtgtgcgtccgtcagcgtggacgctagaggggtttacggggcctcgtggacccgcacgtacggctgcagaggcttgtcacggtaggcgtggtagcgctcggcctcctcggcgc

SEQ ID NO: 37520 - DNA, 260 bp, Unknown
  Description of Unknown: RightRegion for integrase A88 sequence
tacgagcagcatctcaggctcggcagcgtggtcgaacggctacacaccgggatgtcgtagagcggctacccgagaacgcagaagagccccctacgcgccgtgtaagggcacgcagagggctctctggtagtctctattcagttgtggggttgcgtccgtcagcgtggacgctagaggggtttacggggcctcgtggacccgcacgtacggctgcagaggcttgtcacggtaggcgtggtagcgctcggcctcctcggcgc

SEQ ID NO: 37521 - DNA, 260 bp, Unknown
  Description of Unknown: RightRegion for integrase A89 sequence
tacgagcagcatctcaggctcggcagcgtggtcgaacagctacacgccgggatgtcgtagagcggctacccccgagaacgcagaaaagccccctacgcgccgtgtaagggcacgcagagggctctctggtagtctctattcagttgtggggttgcgtccgtcagcgtggatgctagaggggtttacggggcctcgtggacccgcacgtacggctgcagaggcttgtcacggtaggcgtgatagcgctccgcctcctcggc

SEQ ID NO: 37522 - DNA, 260 bp, Unknown
  Description of Unknown: RightRegion for integrase A90 sequence
tacgagcaacatctcaggctcggcagcgtggtcgaacggctacacaccgggatgtcgtagagcggctacccgagaacgcagaaaagccccctacgcgccgtgtaagggcacgcagagggctctctggtagtctctattcagttgtgtggttgcgtacgtcagcgtggacgctagaggggtttacggggcctcgtggacccgtacgtacggctgcagaggcttgtcacggtaggcgtgatagcgctccgcctcctcggcgc

SEQ ID NO: 37523 - DNA, 260 bp, Unknown
  Description of Unknown: RightRegion for integrase A91 sequence
tacgagcagcatctcaggctcggcagcgtggtcgaacggctacacgccgggatgtcgtagagcggctacccgagaacgcagaaaagccccctacgcgccgtgtaagggcacgcagagggctctctggtagtctctattcagttgtggggttgcgtccgtcagcgtggacgctagaggggtttacggggcctcgtggacccgtacgtacggctgcagaggcttgtcacggtaggcgtggtaacgctcggcctcctcggcgc

SEQ ID NO: 37524 - DNA, 260 bp, Unknown
  Description of Unknown: RightRegion for integrase A92 sequence
tacgagcagcatctcaggctcggcagcgtggtcgaacggctacacaccgggatgtcgtagagcggctacccccgagaacgcagaagagccccctacgggccgctagggctcgcagagggcttctccggtagtctctattcagttgtgggtgtgcgtccgtctccgtggacgctagaggggtttacggggcctcgtggacccgcacgtacggctgcagaggcttgtcacggtaggtgtggtagcgctcggcctcctcggcg

SEQ ID NO: 37525 - DNA, 260 bp, Unknown
  Description of Unknown: RightRegion for integrase A93 sequence
tacgagcagcatctcaggctcggcagcgtggtcgaacagctacacaccgggatgtcgtagagcggctacccccgagaacgcagaagagccccctacgcgccgtgtaagggcacgcagagggctctctggtagtctctattcagttgtggggctgcgtccgtcagcgtggacgctagaggggtttacggggcctcgtggacccgtacgtacggctgcagaggcttgtcacggtaggcgtggtatcgctcggcctcctcggc

SEQ ID NO: 37526 - DNA, 260 bp, Unknown
  Description of Unknown: RightRegion for integrase A94 sequence
tacgagcagcatctcaggctcggcagcgtggtcgaacggctacacgccgggatgtcgtagagcggctgcccccgagaacgcagaaaagccccctacgcgccgtgtaagggcacgcagagggctctctggtagtctctattcagttgtggggttgcgtccgtcagcgtggacgctagaggggtttacggggcctcgtggacccgcacgtacggctgcagaggcttgtcacggtaggcgtgatagcgctccgcctcctcggc

SEQ ID NO: 37527 - DNA, 260 bp, Unknown
  Description of Unknown: RightRegion for integrase A95 sequence
actcctgtctggcgtgcgacagccgacgcttctgcatcgaccgacgctggttctcggtaacgggcggggcagtcgccctggcggcggccacccactctgctcgggtcacgtgccgacgaccgtcccgtcctcgtacagccggtagagctcggcgcccttgtcgagctgcgcctcggcccacgcacggatgtcccacgcctgccgggagttgcccaggcggccgaggaagatgcggcgcggggtcgagctctgcaaggagg

SEQ ID NO: 37528 - DNA, 260 bp, Unknown
  Description of Unknown: RightRegion for integrase A96 sequence
ccgaaggacgttcggacccgcctggtcatacggccagacgacttcggacagaccttctgagacaacgcaagaagcccccagtcgagaggtgactgggggcttcgttgttacagcttgctcgggtcgtaggggatctcgtcgtcaccgtcgatgatgacgacctcgatctcgatcacggggcgacgcggccgtgccgcatgaaggcggaccacgtgaggggcatcgcgtcggcgaagacctcctccatctcgtcggccacc

SEQ ID NO: 37529 - DNA, 260 bp, Unknown
  Description of Unknown: RightRegion for integrase A97 sequence
ccgaaggacgttcggacccgcctggtcatacggccagacgacttcggacagaccttctgagacaacgcaagaagcccccagtcgagaggtgactgggggcttcgttgttacagcttgctcgggtcgtaggggatctcgtcgtcaccgtcgatgatgacgacctcgatctcgatcacggggagacgcggccgtgccgcatgaaggcggaccacgtgaggggcatcgcgtcggcgaagacctcctccatctcgtcggccacc

SEQ ID NO: 37530 - DNA, 260 bp, Unknown
  Description of Unknown: RightRegion for integrase A98 sequence
ccgaaggacgttcggacccgcctggtcattcggccagacgacttcggacagaccttctgagaacgcaaaaagcccccagtcgatgagtgactgggggctctgcgttacagcttgctcgggtcgtacgggatctcctcgtcaccgtcgatgatgacgacctcgatctcgatcacggggcgacgcgaccgtgccgctggaacgcgccccaggtgaggggcatgtcctgatggaggaagtcctccatcttctcggcggccatc

SEQ ID NO: 37531 - DNA, 260 bp, Unknown
  Description of Unknown: RightRegion for integrase A99 sequence
ccgaaggacgttcggacccgcctggtcatacggccagacgacttcggacagaccttctgagacaacgcaagaagcccccagtcgagaggtgactgggggcttcgttgttacagcttgctcgggtcgtaggggatctcgtcgtcaccgtcgatgatgacgacctcaatctcgatcacggggagacgcggccgtgccgcatgaaggcggaccacgtgaggggcatcgcgtcggcgaagacctcctccatctcgtcggccacc

SEQ ID NO: 37532 - DNA, 260 bp, Unknown
  Description of Unknown: RightRegion for integrase A100 sequence
ccgaaggacgttcggacccgcctggtcattcggccagacgacttcggacagaccttctgagaacgcaaaaagcccccagtcgatgagtgactgggggctctgcgttacagcttgctcggttcgtacgggtactcgtcgtcaccgtcgatgatgacgacctcgatctcgatcacggggcgacgcgaccgtgccgctggaaggctgcccaggtctcgggcatgtcgtgctggaagaagtcctccatcagctcggcggccatc

SEQ ID NO: 37533 - DNA, 260 bp, Unknown
  Description of Unknown: RightRegion for integrase A101 sequence
tacgagcagcatctcaggctcggcagcgtggtcgaacagctacacaccgggatgtcgtagagcggctacccccgagaacgcagaagagccccctacgggccgctagggctcgcagagggcttctccggtagtctctattcagttgtgggtgtgcgtccgtctccgtggacgctagaggggtttacggggcctcgtggacccgcacgtacggctgcagaggcttgtcacggtaggtgtggtagcgctcggcctcctcggcg

SEQ ID NO: 37534 - DNA, 260 bp, Unknown
  Description of Unknown: RightRegion for integrase A102 sequence
actcgaaattcagagagacaaaattatccctttaatataaaatttgagttctttgattgatctatatacagctttaattttgtttaatttgtctatatatagcatttaaatctaaataaaattcccattttatttagatctgaaagtggcttgattgcataccaaatataaggtaccctgtatatgtatcataggggtttaacagccactataactccagagagctccctcacatagctctctggtttttttaatttata

SEQ ID NO: 37535 - DNA, 260 bp, Unknown
  Description of Unknown: RightRegion for integrase A103 sequence
gaacatgccaaacatgaacatcagtgataacgcttgatatacctccatattctcacccccttccctatcgggataaaagagagtgagccgaccacccttgagagagcctagtcaattgtacatggctattgtaacatgaaaaattttactattctctacttttctacaaccatgtgtataatggacggagaggtgatttgatgactagacctacaaaccttgacgtgattatccatctacggaaaagccgaaaagatatt

SEQ ID NO: 37536 - DNA, 260 bp, Unknown
  Description of Unknown: RightRegion for integrase A104 sequence
tacgagcagcatctcaggctcggcagcgtggtcgaacgactacacgccgggatgtcgtagagcggctacccgagaacgcagaaaagccccctacgcgccgtgtaagggcacgcagagggctctctggtagtctctattcagttgtggggttgcgtccgtcagcgtggacgctagaggggtttacggggcctcgtggacccgcacgtacggctgcagaggcttgtcacggtaggcgtggtagcgctcggcctcctcggcgc

SEQ ID NO: 37537 - DNA, 260 bp, Unknown
  Description of Unknown: RightRegion for integrase A105 sequence
tacgagcagcatctcaggctcggcagcgtggtcgaacagctacacgccgggatgtcgtagagcggctacccgagaacgcagaaaagccccctacgcgccgtgtaagggcacgcagagggctctctggtagtctctattcagttgtggggttgcgtccgtcagcgtggatgctagaggggtttacggggcctcgtggacccgcacgtacggctgcagaggcttgtcacggtaggcgtggtatcgctcggcctcctcggcgc

SEQ ID NO: 37538 - DNA, 60 bp, Unknown
  Description of Unknown: RightRegion for integrase A106 sequence
tacgaggacaagtttacgatttgctttaaagcaaaggtggagattgaagtggtaagataa

SEQ ID NO: 37539 - DNA, 260 bp, Unknown
  Description of Unknown: RightRegion for integrase A107 sequence
tatgataataaagcggtggttgaattcaaatccggacttcaatctgaagtggagatatagaatgaatattttttagcctgtaggatagaaaccacgggcttttttgtatttctatgataaaatatatgtaatgatatttttgcttttactacagtaattttagatatattcccgtttacctttgacattcataatggtgtctcaaggcacgtcgagtgcgtagtgttgctacaacgaagcaaagggtaaaaatcctttat

SEQ ID NO: 37540 - DNA, 260 bp, Unknown
  Description of Unknown: RightRegion for integrase A108 sequence
gttgtccgtcgcgaggtccgcgagggccgtgaacgacagcgagaacgccagtgcgccgacggcgattgtgccgcccgtggccacccgtaccggcgatagaatcctcatctgcaagtgcctccttatggtgtctgagctgcgaagacagtctgtcgcaactgtacttgtctcggccagccgagggatgtacacttgcgattatggcacagccgctaagagccctggtaggagccagggtatcggtcgttcaggggccgcag

SEQ ID NO: 37541 - DNA, 260 bp, Unknown
  Description of Unknown: RightRegion for integrase A109 sequence
cgacgacggctcgtacaagaccgttcacaaaaacggcaaggaccacaaggtctacaagtgcgtccgtcactgcggcggaggccgcggcaagaccgagaccaccgatccgtggtgatctaaccccgcataccaagaaaccccctacccggcccgcgaaggctaggtagggggctttttgtgtttcagtgggtgtggtcgtgatgacctgtgtcttcgtggtttgtctggtcaaccaccgcggtctcagtggtgtacggtac

SEQ ID NO: 37542 - DNA, 260 bp, Unknown; identical to SEQ ID NO: 37540
  Description of Unknown: RightRegion for integrase A110 sequence

SEQ ID NO: 37543 - DNA, 260 bp, Unknown
  Description of Unknown: RightRegion for integrase A111 sequence
gttgtccgtcgcgaggtccgcgagggccgtgaacgacagcgagaacgccagtgcgccgacggcgattgtgccgcccgtggccacccgtaccggcgatagaatcctcatctgcaagtgcctccttatggtgtctgagctgcgaagacagtctgtcgcaactgtacttgtctcggccagccgagggatgtacacttgcggttatggcacagccgctaagagccctggtaggagccagggtatcggtcgttcaggggccgcag

SEQ ID NO: 37544 - DNA, 260 bp, Unknown
  Description of Unknown: RightRegion for integrase A112 sequence
tacgagcagcatctcaggctcggcagcgtggtcgaacggctacacaccgggatgtcgtagagcgactgcccgagaacgcagaaaagccccctacgcgccgtgtaagggcgcgcagagggctctctggtagtctctattcagttgtggggttgcgtccgtcagcgtggacgctagaggtgtttacggggcctcgtggacccgcacgtacggctgcagaggcttgtcacggtaggcgtggtagcgctcggcctcctcggcgc

SEQ ID NO: 37545 - DNA, 260 bp, Unknown
  Description of Unknown: RightRegion for integrase A113 sequence
tacgagcagcatctcaggctcggcagcgtggtcgaacggctacacaccgggatgtcgtagagtggctacccgagagcgcagaaaagccccctacgcgccgtgtaagggcacgcagagggctctctggtagtctctattcagttgtggggttgcgtccgtcagcgtggacgctagaggggtttacggggcctcgtggacccgtacgtacggctgcagaggcttgtcacggtaggcgtggtaacgctccgcctcctcggcgc

SEQ ID NO: 37546 - DNA, 260 bp, Unknown
  Description of Unknown: RightRegion for integrase A114 sequence
tacgagcagcatctcaggctcggcagcgtggtcgaacggctacacaccgggatgtcgtagagcgactacccgagaacgcagaaaagccccctacgcgccgtgtaagggcacgcagagggctctctggtagttctctattcagttgtggggttgcgtccgtcagcgtggacgctagaggggtttacggggcctcgtggacccgcacgtacggctgcagaggcttgtcacggtaggcgtggtagcgctccgcctcctcggcg

SEQ ID NO: 37547 - DNA, 260 bp, Unknown; identical to SEQ ID NO: 37546
  Description of Unknown: RightRegion for integrase A115 sequence

SEQ ID NO: 37548 - DNA, 260 bp, Unknown
  Description of Unknown: RightRegion for integrase A116 sequence
tacgagcagcatctcaggctcggcagcgtggtcgagcagctacacgccgggatgtcgtagagcggctacccgagaacgcagaaaagccctctacgcgccgtgtaagggcgcgcagagggctctctggcagtctctattcagttgtggggttgcgtccgtcagcgtggacgctagaggggtttacggggcctcgtggacccgtacgtacggctgcagaggcttgtcacggtaggcgtggtagcgctccgcctcctcggcgc

SEQ ID NO: 37549 - DNA, 260 bp, Unknown
  Description of Unknown: RightRegion for integrase A117 sequence
tacgagcagcatctcaggctcggcagcgtggtcgaacagctacacaccgggatgtcgtagagcggctacccgagaacgcagaaaagccccctacgcgccgtgtaagggcacgcagagggctctctggtagtctctattcagttgtggggttgcgtacgtcagcgtggacgctagaggggtttacggggcctcgtggacccgcacgtacggctgcagaggcttgtcacggtaggcgtggtatcgctcggcctcctcggcgc

SEQ ID NO: 37550 - DNA, 260 bp, Unknown
  Description of Unknown: RightRegion for integrase A118 sequence
attttttgtgaccaaacagtggctataaaatttaagaatggaatagaggtagtagagtaattctatgaaattttgatataatgtgtgtaaaaaaagtaggtaagaataaagtcttatgaacgagttttgctataaacttaaaggaaaaatacttagaactggccagaaatgggatttgctttcgagttcccaagctgatgtacccctctttgtcgcaaagtatctaaataatgagccaccaaggtatgtggggaaaatac

SEQ ID NO: 37551 - DNA, 260 bp, Unknown
  Description of Unknown: RightRegion for integrase A119 sequence
ggcggggggtttttcagtcgagcgaggtcagcctggcatacgcgtcaagcgttgtccacaaaccctaaagatcgggaactcgatgttcagactttgtgaaagggctgtcttcatggacaactgtaacacgttctagtctgacgaccctggcgtaggcgatccgattttgcggctatgcgaacatcggatacgctgctgacatgcgagttcttggaagaatcagattgtcgagagccacagacgagagcaccagcgtcgag

SEQ ID NO: 37552 - DNA, 260 bp, Unknown
  Description of Unknown: RightRegion for integrase A120 sequence
tacgagcagcatctcaggctcggcagcgtggtcgaacggctacacaccgggatgtcgtagagcggctacccgagaacgcagaaaagccccctacgcgccgtgtaagggcacgcagagggctctctggtagtctctattcagttgtgtggttgcgtccgtcagcgtggacgctagaggggtttacggggcctcgtggacccgtacgtacggctgcagaggcttgtcacggtaggcgtggtagcgctccgcctcctcggcgc

SEQ ID NO: 37553 - DNA, 260 bp, Unknown
  Description of Unknown: RightRegion for integrase A121 sequence
gaaataactttcgctttaaaatgtgggctgaatttaacagaaaggttggtaaagatatgacacatacaccatatggataccgcatcgaaaatggaatagcggtagttgatgaagttgatgcagaaagaatcaaggctctttatcaagaatacattgattgtaagtctatgagagctgctactaagaaagctggaattgataagactcattcagttataggtagaattctaaagaataaagtatatcttggtacagtttat

SEQ ID NO: 37554 - DNA, 60 bp, Unknown
  Description of Unknown: RightRegion for integrase A122 sequence
attaaggaaaatagaaatattgaatttatctttaaaaatggtgaggttacagttcattga

SEQ ID NO: 37555 - DNA, 60 bp, Unknown
  Description of Unknown: RightRegion for integrase A123 sequence
attaccaaagaaaaatcagctattttcaccttcaagagtggtcaggaaattatcatttga

SEQ ID NO: 37556 - DNA, 60 bp, Unknown
  Description of Unknown: RightRegion for integrase A124 sequence
ataaaagtagacaagcacatcagcctaaccttcaaaaatggcgtgcggattgatttataa

SEQ ID NO: 37557 - DNA, 60 bp, Unknown
  Description of Unknown: RightRegion for integrase A125 sequence
attaaagagggcaagaaaatcagcctcaccttcaaaaatggtgttcggattgatttatag

SEQ ID NO: 37558 - DNA, 60 bp, Unknown; identical to SEQ ID NO: 37557
  Description of Unknown: RightRegion for integrase A126 sequence

SEQ ID NO: 37559 - DNA, 60 bp, Unknown; identical to SEQ ID NO: 37557
  Description of Unknown: RightRegion for integrase A127 sequence

SEQ ID NO: 37560 - DNA, 260 bp, Unknown
  Description of Unknown: RightRegion for integrase A128 sequence
gtagtagattctgaaggtcaaatagatgtcataactcctcttggggttgttaaagattaattttacgtgtttcaaaccacatctccaatgtaacatgttttgaaacacagaaaccaattcgaattttcttcgggatttttccaaaaaaaataacgtttttgtatcagtcattttgtttttgataagttatatttatagcatggccacaaagaaagagagggtaccgattctggttcctctctttttctattttaattttg

SEQ ID NO: 37561 - DNA, 260 bp, Unknown
  Description of Unknown: RightRegion for integrase A129 sequence
gtagtagattctgatggtcaaatagatgtcataactcctctaggggttattaaagattaattttacgtatttcaaaccacatctccaatataacatgttttgaaacacagaaaccaattcgaattttcttcgggatttttccaaaaaaaataacgtttttgtatcagtcatttggattttgataagttatatttatagcatggccacaaagaaagagagggtaccgattctggttcctctctttttctattttaattttg

SEQ ID NO: 37562 - DNA, 260 bp, Unknown; identical to SEQ ID NO: 37509
  Description of Unknown: RightRegion for integrase A130 sequence

SEQ ID NO: 37563 - DNA, 260 bp, Unknown
  Description of Unknown: RightRegion for integrase A131 sequence
gggaccatccacgcctgagccacgccgttgtcggccgcgagctcggtgagcgcggtgaacgacagcgagaacgccagagcgccgaccgccacggttccggctgtcgcgacacgcacgggggatagaatcgacattgcacgagctcctatctcgtgtatcgcccctggtctgttcgcgcaggccaggggctttctgacctagtgaagaatcccgaaaatcgggagcccgagtttcaacattcttctctccttgctactgtg

SEQ ID NO: 37564 - DNA, 260 bp, Unknown
  Description of Unknown: RightRegion for integrase A132 sequence
gatgagctgacattcaatttgaaatgcggtctttccctgaaagaaaaggtggtgagataaatggcatatattccatatggatacaaaattcaagatggagtggttactgtcgatgaaaaggcagcaggtcaagtaaaggtattctttgagaaatacatatcaggactatcccttacagtggctggcgaacaggcaggtattgataagacacactctgtgatgggtcgcattttgaaaaacgtcaactaccttggaaatga

SEQ ID NO: 37565 - DNA, 260 bp, Unknown
  Description of Unknown: RightRegion for integrase A133 sequence
acagtctatgaagaccacttcgtcatagccttcaaatcaggtttcgaaatggaagtatgagatgcatttgattatttttgtattgaacacatcgttttgttgtgttattctataggttgatataaataaagatgtaggaggaaccgaaactatgacagcatcaatacgtttaagataagctggcaataaaaaaggcagaatctatcccaatgataggcttttttgttgtgcttatttatacgatattgagcattcattag

SEQ ID NO: 37566 - DNA, 260 bp, Unknown
  Description of Unknown: RightRegion for integrase A134 sequence
ggccccatcgaggagcgcgtgcgcctccactggcacccgccgctcgagctcgccgcctagtttcgcgggaagagcaacaaaggcggacgctggtggcggacgctgggcggacgatgccctcccccagcgtccgcctagcaccgtccgccaccgtccgccaccgtccgccgagcccaaaatgacaccaccgtccgcccagcgtccgccccagcgtccgccccagcgtccgcctagaaacccgcggaattacgcggcaaaac

SEQ ID NO: 37567 - DNA, 260 bp, Unknown
  Description of Unknown: RightRegion for integrase A135 sequence
atcaccaaggatagtgatgttgaaattacatttaagaacggagcggtctcaactatataggtacgactgctttattttttttgatataatagatgtaaaataatttagtaagaacggtgaattgaatggattttgaaactttaactcgttttatcatttgtgaagcaaaagtgttgagtggtcagacattcaataattttgaagaatttttagtggtttttgaagaattctatagttctattacgaatgaactggttaga

SEQ ID NO: 37568 - DNA, 260 bp, Unknown
  Description of Unknown: RightRegion for integrase A136 sequence
atcaccaaggatagtgatgttgaaattacatttaagaacggagcggtctcaactatataggtacgactgctttatttttttttgatataatagatgtaaaataatttagtaagaacggtgaattgaatggattttgaaactttaactcgttttatcatttgtgaagcaaaagtgttgagtggtcagacattcaataattttgaagaatttttagtggtttttgaagaattctatagttctattacgaatgaactggttag

SEQ ID NO: 37569 - DNA, 260 bp, Unknown
  Description of Unknown: RightRegion for integrase A137 sequence
actgtgtatgaagaccacttcgtcatagccttcaaatctggcttcgaaatggaaatatgaaaaccagaagtaaatagcccatgactctacagtagagttgtgggttttcttttgcttgctgattataataatattttaataactattgtgtttatcaaccaaatggtttataatattcttagcgtaaacttggaggtgctgtatgactacggcagaaatgattaaagaactgtgtgagcaaatgaatataagtgtttccg

SEQ ID NO: 37570 - DNA, 260 bp, Unknown; identical to SEQ ID NO: 37564
  Description of Unknown: RightRegion for integrase A138 sequence

SEQ ID NO: 37571 - DNA, 260 bp, Unknown
  Description of Unknown: RightRegion for integrase A139 sequence
gggaccatccatgcctgcgccacgccgttgtcggccgcgagctccgtgagcgcggtgaacgacagcgagaacgccagacctccgaccgccacggttccggccgtcgcgacacgcacgggggatagactcagcactgcaccagctcctatctggtgtaacgcccctggtctgttcacgcaggccaggggctcttttcgttagtgaagaatcccgaaaaacgggagcccgagtttcaacattcttctctccttgctactgtc

SEQ ID NO: 37572 - DNA, 260 bp, Unknown; identical to SEQ ID NO: 37571
  Description of Unknown: RightRegion for integrase A140 sequence

SEQ ID NO: 37573 - DNA, 260 bp, Unknown
  Description of Unknown: RightRegion for integrase A141 sequence
gggagcatccacgcctgagccacgccgctgtcggccgcgagctcggtgagcgcggtgaacgacatcgagaaggccagagctccgaccgcgaccgttccggccgtcgcgacacgcacgggggatagaatcgacactgcaccagctcctatctggtgtaacgcccctggtctgttcgcgcaggccaggggctctttcctctagtgaataatcccgagaatcgggagcccgagttttatcattcttcactccttgctaccatg

SEQ ID NO: 37574 - DNA, 260 bp, Unknown
  Description of Unknown: RightRegion for integrase A142 sequence
aatgacttcttcgcccagggcgccgaagagctagaagcaatagcacgcgctgaggcgtgacacagcgggaaggggtcgagccggcgaacccggttcggcccttttttcgtgatctcagatcgttagttagactaactagtggttccttcgtcacggcagcgggcaggcgcacgacgtctgacctgggcgaagtgatgttgtgacgtagtgatccattttcatgattcacataagacttctctaagggcaatccggagtcg

SEQ ID NO: 37575 - DNA, 260 bp, Unknown
  Description of Unknown: RightRegion for integrase A143 sequence
aatgagttcttcgatcagggcgccgaagagcttgaagcaatcgcacgcactgaagcctgatccagcgggaaggggtcgagccggcgaacccggttcggcccttttttcgtggcgtcagatcgttagttagtctaactagtagtgactccgtcacgtcagcgggcaggggcaagccgtctgacctggggcgagtgatgctgtgacgtagtgacccgttttcatgattcacataagacttctctaagggcaatccggagtcg

SEQ ID NO: 37576 - DNA, 60 bp, Unknown
  Description of Unknown: RightRegion for integrase A144 sequence
atttataaaaataaaaaagtagcagttcacttcaaaaacggtcaggttatcgaaatataa

SEQ ID NO: 37577 - DNA, 260 bp, Unknown
  Description of Unknown: RightRegion for integrase A145 sequence
gtcgtggcgacgatgatgccgccgtcgacaacgagggggaccatccacgcctgcgacactccgttgtccgctgagagctcactgagcgccgtgaacgacaacgcgaaggccaagccgccgaccgcgaccgttccggccgtcgccactctgactggggatagcatctgcactggtgaggggtcctttctcttcgacttccaatgtgttggattctgccagcagttcctgtaacattggaaactatgccacaaccgctaaga

SEQ ID NO: 37578 - DNA, 260 bp, Unknown
  Description of Unknown: RightRegion for integrase A146 sequence
tcttgcggtctgcgtcgtgtcgctcccggtcggcttgatcgttgtggccattggagcgtaccgggtagcaaaggccggggatatttatgacgctgcggtcgctcggtacgagcagcaaatctcggactatgttgactggctggatgaagtcaacgcaaaataaaaagccgccctcggtgggcggcgggaggttgctctgaatgtgcgcaaaaaagaaaccggccatgcttgagccggatatgcaggatgccgtgatctac

SEQ ID NO: 37579 - DNA, 260 bp, Unknown
  Description of Unknown: RightRegion for integrase A147 sequence
cactgggagctacgcactcctgagcacgagccgcggctggtcccccgcaccgccgagtgactccccggcgtaggccgccctgtgcgtccacggcgacgccggagagtgtcataggagtgagcctggagacgccagagtgcgccggggatgctgcccataacggttatgtcacggtcaaatcggtgtcagaccccagtcgtaaacttgttcgactgacgttctgacgcaactttcgtcatttctctatccagcttctagtc

SEQ ID NO: 37580 - DNA, 260 bp, Unknown
  Description of Unknown: RightRegion for integrase A148 sequence
ctttattaccatgtcaaccggaaggcgcgaatcattagcaaggacggcccgaacgactgcgattggtctgctgccaattttgcgtatgatctattaagttcgggcgtcgaacttttggaacatgagacggcaagtgaatataacgaacgcgtcgggattccgccgctcgtatctggctatatgaaagcgaggttaaactaatgaacagtttagaagtggcgatctatcttcgtaagtcacgggccgatgttgaggaagaa

SEQ ID NO: 37581 - DNA, 260 bp, Unknown
  Description of Unknown: RightRegion for integrase A149 sequence
tacgagcagcatctcaggctcggcagcgtggtcgaacggctacacgccgggatgtcgtagagcggctacccgagaacgcagaaaagccccctacgcgccgtgtaagggcacgcagagggctctctggtagtctctattcagttgtgtggttgcgtccgtcagcgtggacgctagaggggtttacggggcctcgtggacccgcacgtacggctgcagaggcttgtcacggtaggcgtggtagcgctcggcctcctcgacgc

SEQ ID NO: 37582 - DNA, 260 bp, Unknown
  Description of Unknown: RightRegion for integrase A150 sequence
gacggttccggctgttgccattgggacggcagatagaatcctcatgcaccgctcctatcggtgtgaagtggcccctcgtctgttagcgcaggcggggggttttcaagttggaccgtaccacggcaagcctcctacctggcaagatagtttcccaagtggctcagagtactggtatagtgatcgttatgggaattacgaagttgcaggtcagagcactggtcggtgctcgcgtgtctcacgtccaaggcgaggaaaagaca

SEQ ID NO: 37583 - DNA, 260 bp, Unknown
  Description of Unknown: RightRegion for integrase A151 sequence
tacgagcagcatctcaggctcggcaacgtggtcgaacggctacacaccgggatgtcgtagagcgactacccgagaacgcagaaaagccccctacgcgccgtgtaagggcacgcagagggctctctggcagtctctattcagttgtgggtgtgcgtccgtctccgtggacgctagaggggtttacggggcctcgtggacccgcacgtacggttgcagaggcttgtcacggtaggcgtggtatcgctcggcctcctcggcgc

SEQ ID NO: 37584 - DNA, 260 bp, Unknown; identical to SEQ ID NO: 15830
  Description of Unknown: RightRegion for integrase A152 sequence

SEQ ID NO: 37585 - DNA, 260 bp, Unknown
  Description of Unknown: RightRegion for integrase A153 sequence
tacgagcagcatctcaggctcggcagcgtggtcgagcggctacacaccgggatgtcgtagagcggctacccgagaacgcagaaaagccccctacgcgccgtgtaagggcacgcagagggctctctggtagtctctattcagttgtggggttgcgtacgtcagcgtggacgctagaggggtttacggggcctcgtggacccgcacgtacggctgcagaggcttgtcacggtaggcgtggtatcgctcggcctcctcggcgc

SEQ ID NO: 37586 - DNA, 260 bp, Unknown
  Description of Unknown: RightRegion for integrase A154 sequence
agcagaacggaaattggctttgttatgaaatttggacctatttttaaagagaggatttaagatgaagcatacaccatatggatatattatcgtggacggtaaggcagtagtaaacgaaaaagaggcaaagagattacaaaaaatttgtgataattatctttcaggaatgtcatttgtagcatctgcaaaatcagttggccttaaaatgcagcattctggggttaaaagattgatgcttaataaacgttatttaggggatg

SEQ ID NO: 37587 - DNA, 60 bp, Unknown
  Description of Unknown: RightRegion for integrase A155 sequence
atctataaagacaaacaagtagaagtccacttcaagaacgaacaagtcatatctatgtga

SEQ ID NO: 37588 - DNA, 260 bp, Unknown
  Description of Unknown: RightRegion for integrase A156 sequence
agcaaaaacacatgctacttctgatattgtgaaacttactaatttatcaaataaaagtgtttatgatgtattaaataaatataacgtaaaagctgtaaataaaaatcaatggatagcaacagatgttgatattgaagatgagatagatttatcagttacatttactttgaataagaatggaataagaggtggaattatagatgagaactaatgaacataacttccataatatagaagaagaaatcaaacatgttgctgta

SEQ ID NO: 37589 - DNA, 260 bp, Unknown
  Description of Unknown: RightRegion for integrase A157 sequence
ttgtggactggtatatggcaatcattaaagctgcacaaaataaaggctatgtatggcgatctaaaaaatggttttcaggtaaaaagcaaacgttcttctgtcatgattgtgggaataacttttctgcttaaaattatgaacttaacaaaaaataaaaaaagtcctccaagttttggtcgaggaggaggacttaatcacaaatgtatagcaagacacacaaaagatgtgatgttttactatgctcaattttaacacagaat

SEQ ID NO: 37590 - DNA, 260 bp, Unknown
  Description of Unknown: RightRegion for integrase A158 sequence
gtcacttatctttctaacccatactacaaatctctaacaacaactctttcaactcatgaattctctttccctaaaaaacttgatgtctcagatttttatagatttttagttcaattatctatcgaaaatagacaaaaaattaattcataaaacaaaaaaagccctccaagttttggtagaggaggagggcttaatcacaaatgtatagcaagacacacaaaagatgtgatgttttactatgctcaattttaacacagaat

SEQ ID NO: 37591 - DNA, 260 bp, Unknown
  Description of Unknown: RightRegion for integrase A159 sequence
catccacgcctgcgacacgccgttgtccgctgacagctcactcagcgccgtgaacgataacgcgaaggccaagccgccgaccgcgaccgttccggccgtcgccactctgactggggatagcatctgcactggtgagagccctttcctatcgacttacaatgtgctggattctgccagcagagtccggtacattggaaactatgccacaaccacttagagccctggtcggggcccgagtcagtgtagtccaaggaccgcag

SEQ ID NO: 37592 - DNA, 60 bp, Unknown
  Description of Unknown: RightRegion for integrase A160 sequence
aactctggcagaccagcgttgagcgattggatatcaaagaagataagaaaatcagcctaa

SEQ ID NO: 37593 - skipped

SEQ ID NO: 37594 - DNA, 60 bp, Unknown
  Description of Unknown: RightRegion for integrase A162 sequence
gatcaaatcatagttcacccagatggaaaaattgaaatcctttataaattcaaggtttaa

SEQ ID NO: 37595 - DNA, 100 bp, Unknown
  Description of Unknown: RightRegion for integrase A163 sequence
aagaagcagagagaagacaacttcgaactttggatttatccaaagctgcctgaaaaataggcgtttgtactggtgtctaacatgcagaaggtaactcatt

SEQ ID NO: 37596 - DNA, 260 bp, Unknown
  Description of Unknown: RightRegion for integrase A164 sequence
cgaggagacccggacgctcgacttcgggaacacccgctacacctgctgacaaccgccctcgggccggtccttcggggccggctcgggggctcttttttttttgtgcctaacatatgcacggattcgcatatatttattagggcaacgtgatgttcgaggagtagaacatcactttcaccaaactcatgtaccctgtccctatgcgtgttctcgggagactgcgtctgtccaggtcaacggaggaatctacctccatcgag

SEQ ID NO: 37597 - DNA, 260 bp, Unknown; identical to SEQ ID NO: 24343
  Description of Unknown: RightRegion for integrase A165 sequence

SEQ ID NO: 37598 - DNA, 260 bp, Unknown
  Description of Unknown: RightRegion for integrase A166 sequence
aggggaaccatccacgcctgcgacactccgttgtccgctgaaagctcactgagcgccgtgaacgacaacgcgaaggccaagccgccgaccgcgaccgttccggccgtcgccactctgactggggatagcatctgcactggtaggaggtcctttcccgtcgacttacaatgtgttggattctgccagcagaacctgtaacattggaaactatgccacaaccgcttagagccctggtcggggcccgagtcagtgtagtccaa

SEQ ID NO: 37599 - DNA, 260 bp, Unknown
  Description of Unknown: RightRegion for integrase A167 sequence
ctcactcagcgccgtgaacgacaacgcgaaggccaagctgccgaccgcgaccgtaccggccgtcgcaacccgaaccggggatagaatcttcactgcaccagctcctatctggtgtcacaccctctgcctgttcgcgcaggtagagggccctttgcttacgacttccaatgtgttggattctgccagcagaacctgtaacattggaaactatgccacaaccgcttagagccctggtcggggcgcgtgtcagtgtagtccaa

SEQ ID NO: 37600 - DNA, 260 bp, Unknown
  Description of Unknown: RightRegion for integrase A168 sequence
gcccgagagcccaccctctctgtccggaccgtacctgttcgaccttcgcaaccaacgatgctgacacccgccctcgggtcggtcttcggaccggctcgggggctcctttttttgtgcccaaatcccatgcacgatcacgcatgtatcagtattgggggaacgcgatattcgaggagtagaacatcaccttcaccaaattcatgtatcctaccttcgtgcgtgtgttggggagactgcgtctgtcgaggtcaacggaggaa

SEQ ID NO: 37601 - DNA, 260 bp, Unknown
  Description of Unknown: RightRegion for integrase A169 sequence
agggggaccatccacgcctgcgacactccgttgtccgctgagagctcactgagcgccgtgaacgacaacgcgaaggccaagccgccgaccgcgaccgttccggccgtcgccactctgactggggatagcatctgcactggtaggaggtcctttcccgtcgacttacaatgtgttggattctgccagcagaacctgtaacattggaaactatgccagaaccgcttagagccctggtcggggcccgtgtcagtgtagtgcaa

SEQ ID NO: 37602 - DNA, 260 bp, Unknown
  Description of Unknown: RightRegion for integrase A170 sequence
ctgaggctgggcgcggctctagacctcgtaaacgcagaaaagccccctacgggccgctagggctcgcagagggcttctccggtagtctctattcagttgtactgctgagtccgtcagcgtgggtgctagaggggtttacggggcctcgtggacccgcacgtacggctgcagaggcttgtcacggtaggcgtggtagcgctcggcctcctcggcgcggatggcctcgatctcctgagccgaactcaccttacgacgctgca

SEQ ID NO: 37603 - DNA, 260 bp, Unknown
  Description of Unknown: RightRegion for integrase A171 sequence
ctgaggctgggctcggctctagaccttgtaaacgcagaaaagccccctacgggccgctagggcacgcagagggctctctggtagtctctattcagttgtactgctgagcccgtcagcgtggacgctagaggggtttacggggcctcgtggacccgcacgtacggctgcagaggcttgtcacggtaggcgtggtagcgctctttctcgtcggagatcggcttgagaagctcgctgtcgatatgctcccgcacgaccttcat

SEQ ID NO: 37604 - DNA, 260 bp, Unknown
  Description of Unknown: RightRegion for integrase A172 sequence
ctgaggctgggctcggctctagaccttgtaaacgcagaaaagccccctacgggccgctagggctcgcagagggcttctccggtagtctctattcagttgtactgctgagtccgtcagcgtggacgctagaggggtttacggggcctcgtggacccgcacgtacggctgcagaggcttgtcacggtaggcgtggtagcgctcggcctcctcggcgcggatggcctcgatctcctgagccgcgctcaccttacgacgctgca

SEQ ID NO: 37605 - DNA, 260 bp, Unknown
  Description of Unknown: RightRegion for integrase A173 sequence
ctgaggctgggcacggctctagacctcgtaaacgcagaaaagccccctacgggccgctagggctcgcagagggcttctccggtagtctctattcagttgtactgctgagtccgtcagcgtggacgctagaggggtttacggggcctcgtggacccgcacgtacggctgcagaggcttgtcacggtaggcgtggtagcgctcggcctcctcgacgcggatggcctcgatctcctgagccgcgctcaccttacgacgctgca

SEQ ID NO: 37606 - DNA, 260 bp, Unknown; identical to SEQ ID NO: 37605
  Description of Unknown: RightRegion for integrase A174 sequence

SEQ ID NO: 37607 - DNA, 260 bp, Unknown
  Description of Unknown: RightRegion for integrase A175 sequence
ctgaggctgggctcggctctggacctcgtaaacgcagaaaagccccctacgggccgctagggctcgcagagggcttctccggtagtctctattcagttgtgggtgtgcgtccgtcagcgtggacgctagaggggtttacggggcctcgtggacccgcacgtacggctgcagaggcttgtcacggtaggcgtggtagcgctcggcctcctcggcgcggatggcctcgatctcctgagccgcgctcaccttacgacgctgca

SEQ ID NO: 37608 - DNA, 260 bp, Unknown; identical to SEQ ID NO: 24346
  Description of Unknown: RightRegion for integrase A176 sequence

SEQ ID NO: 37609 - DNA, 260 bp, Unknown
  Description of Unknown: RightRegion for integrase A177 sequence
ctgaggctgggcgcggctctatacctcgtaaacgcagaaaagccccctacgggccgctagggctcgcagagggcttctccggtagtctctattcagttgtactgctgagtccgtcagcgtgggcgctagaggggtttatggtgcctcgtggacccgcacgtacggctgcagaggcttgtcacggtaggcgtggtagcgctctttctcgtcggagatcgacttgagaagctcgctgtcgatattctcccgcacgaccttca

SEQ ID NO: 37610 - DNA, 260 bp, Unknown
  Description of Unknown: RightRegion for integrase A178 sequence
ctgaggctgggcacggctctagacctcgtaaacgcagaaaagccccctacgggccgctagggctcgcagagggcttctccggtagtctctattcagttgtactgctgagtccgtcagcgtggatgctagaggggtttacggggcctcgtggacccgtacgtacggttgcagaggcttgtcacggtaggcgtggtatcgctcggcctcctcggcgcggatggcctcgatctcctgagccgcgctcaccttacgacgctgca

SEQ ID NO: 37611 - DNA, 260 bp, Unknown; identical to SEQ ID NO: 24346
  Description of Unknown: RightRegion for integrase A179 sequence

SEQ ID NO: 37612 - DNA, 260 bp, Unknown
  Description of Unknown: RightRegion for integrase A180 sequence
ctgaggctgggctcggctctagacctcgtaaacgcagaaaagccccctacgggccgctagggctcgcagagggcttctccggcagtctctattcagttgtgggtgtgcgtccgtctccgtggacgctagaggggtttacggggcctcgtggacccgcacgtacggctgcagaggcttgtcacggtaggcgtggtatcgctcggcctcctcggcgcggatggcctcgatctcctgagccgcgctcaccttacgacgctgca

SEQ ID NO: 37613 - DNA, 260 bp, Unknown; identical to SEQ ID NO: 24346
  Description of Unknown: RightRegion for integrase A181 sequence

SEQ ID NO: 37614 - DNA, 260 bp, Unknown
  Description of Unknown: RightRegion for integrase A182 sequence
ctgaggctgggcgcggctctagacctcgtaaacgcagaaaagccccctacgggccgctagggctcgcagagggcttctccggtagtctctattcagttgtgggtgcgcgtccgtctccgtggacgctagaggggtttacggggcctcgtggacccgcacgtacggctgcagaggcttgtcacggtaggcgtggtagcgctcggcctcctcggcgcggatggcctcgatctcctgagccgcgctcaccttacgacgctgca

SEQ ID NO: 37615 - DNA, 260 bp, Unknown
  Description of Unknown: RightRegion for integrase A183 sequence
gaaaataataatcaatccaaagttttaggtttaagattaaaaacagtacatgacttagctaccgctcttaatgttaaagaaaataaaatattaattttagataaagactaggttttaattatatttatttacctagtctttattttattgaattacatctattaattacatataatgaatgtaaaaggaggtattttccaatgaataaaaaaatatgtatttatttaagaaagtctagagctgatgaagaacttgaaaaa

SEQ ID NO: 37616 - DNA, 260 bp, Unknown
  Description of Unknown: RightRegion for integrase A184 sequence
cactgaattaaaaagtgaaatatcagaagttaagaaaactgtaataagaattgaaaatgaccatggtaaaaaacttgaagctttatttgatggttataaacaaaattcagagaaacttaatagaattgaagatgaagttgccaaacataaagaagtaattataaaaaggattaaataattatatttaatgaggtgatgttttgaataaaatttgtatttatttaagaaaatcacgtgctgatgaagaacttgaaaaaact

SEQ ID NO: 37617 - DNA, 260 bp, Unknown; identical to SEQ ID NO: 37616
  Description of Unknown: RightRegion for integrase A185 sequence

SEQ ID NO: 37618 - DNA, 260 bp, Unknown
  Description of Unknown: RightRegion for integrase A186 sequence
cactgaattaaaaagtgaaatatcagaagttaagaaaactgtaataagaattgaaaatgaccatggtaaaaaacttgaagctttatttgatggttataaacaaaattcagagaaacttaatagaattgaaaatgaagttgccaaacataaagaagtaattataaaaaggattaaataattatatttaatgaggtgatgttttgaataaaatttgtatttatttaagaaaatcacgtgctgatgaagaacttgaaaaaact

SEQ ID NO: 37619 - DNA, 260 bp, Unknown
  Description of Unknown: RightRegion for integrase A187 sequence
gtggatcttcgtggcgatcaacaacagcggcaagaccaagacggtctaccgctgaccccgacctccgggctggccttcgggctggcccgggggtctttttttgtgcccaacatatgcacgtattcgcatctgtttgtttggggaacgtgatattcgaggagtagaacatcacctttaccaaactcttgtatcctgtcggtatgcgtgtactaggaagactgcgtctgtccaggtcaacggaggaatctacctccatcgag

SEQ ID NO: 37620 - DNA, 260 bp, Unknown
  Description of Unknown: RightRegion for integrase A188 sequence
gggaccatccatgcgtgggccactccgctgtcggccgccagctccgtgagggcggtgaacgagagcgagaacgccaggcccccaacgaaaacggtgcctgcggtagccagcttgacgggagagagcatcggagcctttcgggggatgtgatgttcgaggagtagaacatcacttttaccaaactccggtatccttgtcatatgcgagtgctcggaagattgcgtttgtccaggtcaacggaggaatctacctccatcgag

SEQ ID NO: 37621 - DNA, 260 bp, Unknown
  Description of Unknown: RightRegion for integrase A189 sequence
ctctctgttcggaccgtacctgttcgaccttcgcaaccaacgatgctgacacccgccctcgggtcggtcttcggaccggctcgggggctcctttttttgtgcccaaatcccatgcacgatcacgcatgtatcagtattgggggaacgcgatattcgaggagtagaacatcaccttcaccaaattcatgtatcctaccttcgtgcgtgtgttggggagactgcgtctgtcgaggtcaacggaggaatccacctcgattgag

SEQ ID NO: 37622 - DNA, 260 bp, Unknown
  Description of Unknown: RightRegion for integrase A190 sequence
gtccagcccagccacgtctccttcgagatggggctacttgtgctggcacgacacggtgagtggctaggtccgtgggtcgcattgggacaaagcccgcagggctagggggacaaggcgagggccacaggtctagccgcccgtagggcgtccttacggtcaggggagcccccgtcaggggtcagtctccaggagccgtttcaatgccaacgtacgatagatccatgcgcgtgataggccgactaagaatctcccgtcagtcc

SEQ ID NO: 37623 - DNA, 260 bp, Unknown
  Description of Unknown: RightRegion for integrase A191 sequence
gtccagcccagccacgtctccttcgagatggggctacttgtgctggcacgacacggtgagtggctaggtccgtgggtcgcattgggacaaagcccgcagggctagggggacaaggcgagggccaagggtctagccgcccgtagggcgtccttacggtcaggggagcccccgtcaggggtcagtctccaggagccgttccaatgccaacgtacgatagatccatgcgcgtgataggccgactaagaatctcccgacagtcc

SEQ ID NO: 37624 - DNA, 260 bp, Unknown
  Description of Unknown: RightRegion for integrase A192 sequence
agtccagcccagccacgtctccttcgagatggggctacttgtgctggcctgacacggtgaggggctaggtccgtgggtcgcattgggacaagcccgcagggctagggggacaaagcgagggccaagagtctagtcgcccgaagggcgtccttacggtcaggggagcccccgtcaggggtcagtctccaggagccgtttcaatgccaacgtacgatagatccatgcgcgtgataggccgactgagaatctcccgacaaacc

SEQ ID NO: 37625 - DNA, 260 bp, Unknown; identical to SEQ ID NO: 37624
  Description of Unknown: RightRegion for integrase A193 sequence

SEQ ID NO: 37626 - DNA, 260 bp, Unknown
  Description of Unknown: RightRegion for integrase A194 sequence
gggaccatccatgcgtgggccactccgctgtcggccgccagctccgtgagggcggtgaacgacagggagaacgcgaggccgccaacgaacacggtgcctgcggtagccagcttgacgggagagagcatcggagcctttcgggggatgtgatgttcgaggagtagaacatcacttttaccaaactccggtatccttgtcatatgcgagttctgggaagattgcgtttgtcgaggtcaacggaggaatctacctccatcgag

SEQ ID NO: 37627 - DNA, 260 bp, Unknown
  Description of Unknown: RightRegion for integrase A195 sequence
agtccagcccagccacgtctccttcgagatggggctacttgtgctggcctgacacggtgaggggctaggtccgtgggtcgcattgggacaagcccgcagggctagggggacaaagcgagggccaagagtctagtcgcccgaagggcgtccttacggtcaggggagcccccgtcaggggccaatctccaggagccgttccgatgccaacgtacgatagatccatgcgcgtgataggccgactgagaatctcccgacaaacc

SEQ ID NO: 37628 - DNA, 260 bp, Unknown
  Description of Unknown: RightRegion for integrase A196 sequence
ctctctgtccggaccgtacctgttcgaccttcgcaaccaacgatgctgacacccgccctcgggtcggtcttcggaccggctcgggggctcctttttttgtgcccaaatcccatgcacgatcacgcatgtatcagtattgggggaacgcgatattcgaggagtagaacatcaccttcaccaaattcatgtatcctaccttcgtgcgtgtgttggggagactgcgtctgtcgaggtcaacggaggaatccacctcgattgag

SEQ ID NO: 37629 - DNA, 260 bp, Unknown
  Description of Unknown: RightRegion for integrase A197 sequence
gggaccatccatgcgtgggccactccgctgtcggccgccagctccgtgagggcggtgaacgagagcgagaacgccaggcccccaacgaaaacggtgcctgcggtggccagcttgacgggagagagcatcggagcctttcgggggatgtgatgttcgaggagtagaacatcacttttaccaaactccggtatccttgtcatatgcgagtgctcggaagattgcgtttgtccaggtcaacggaggaatctacctccatcgag

SEQ ID NO: 37630 - DNA, 260 bp, Unknown
  Description of Unknown: RightRegion for integrase A198 sequence
ctgaggctgggctcggctctagacctcgtaaacgcagaaaagccccctacgggccgctagggctcgcagagggcttctccggtagtctctattcagttgtactgctgagtccgtcagcgtgggcgctagaggggttttacggggcctcgtggacccgcacgtacggctgcagaggcttgtcacggtaggtgtggtagcgctcggcctcctcggcgcggatggcctcgatctcctgagccgcgctcaccttacgacgctct

SEQ ID NO: 37631 - DNA, 260 bp, Unknown
  Description of Unknown: RightRegion for integrase A199 sequence
acgacagcgagaacgccagggctccgaccgccacggttccggccgtcgcgacacgcacgggggatagaatcgacattgcacgagctcctatctcgtgtatcgcccctggtctgttcgcgcaggccaggggctcttctgacctagtgaagaatcccgaaagtcgggagcccgagtttcaacattcttctctccttgctactgtgtctgacatgcgagttcttggaagattgcgaatttcacgagccactgaggaatctacc

SEQ ID NO: 37632 - DNA, 260 bp, Unknown
  Description of Unknown: RightRegion for integrase A200 sequence
acggttccagccgtcgcggacctgagcggggtgatctcccgtagaatttccattgcacctggtcctttcaggtgtaacgcctcctaccagtcctgcgcctaaacagctggtagggggcttctttcgttgttgtggagcgatacggtacatcatctcaagtgtgtttgcttcgggcaaccgagcagcgtacatttgaaatcatgacccaaacactccgcgccctggtaggcgcacgtgtcagcgtagtccaaggtccgcag

SEQ ID NO: 37633 - DNA, 260 bp, Unknown
  Description of Unknown: RightRegion for integrase A201 sequence
tacgagcagcatctcaggctcggtagcgtggtcgaacggctacacgccgggatgtcgtagagcggatacccgagaacgcagaaaagccccctacgcgccgtgtaagggcacgcagagggctctctggtagtctctattcagttgtggggttgcgtccgtcagcgtgtctacccagctccgcgtacggccccttgacaagctgagcgacctgagcggtggtaagaggcgcgaacgccttccgaaccgctacgagtacggct

SEQ ID NO: 37634 - DNA, 260 bp, Unknown
  Description of Unknown: RightRegion for integrase A202 sequence
tacgagcagcatctcaggctcggcagcgtggtcgaacggctacacaccgggatgtcgtagagcggctacccgagaacgcagaaaagccccctacgcgccgtgtaagggcacgcagagggctctctggcagtgtctctattcagttgtggggttgcgtccgtcagcgtggacgctagaggggtttacggggcctcgtggacccgcacgtacggctgcagaggcttgtcacggtaggcgtggtatcgctcggcctcctcggc

SEQ ID NO: 37635 - DNA, 260 bp, Unknown
  Description of Unknown: RightRegion for integrase A203 sequence
tacgagcagcatctcaggctcggcagcgtggtcgaacggctacacaccgggatgtcgtagagcggctacccgagaacgcagaaaagccccctacgcgccgtgtaagggcacgcagagggctctctggtagtctctattcagttgtgtggttgcgtccgtcagcgtggacgctagaggggtttacggggcctcgtggacccgcacgtacggctgcagaggcttgtcacggtaggcgtggtagcgctccgcctcctcgacgc

SEQ ID NO: 37636 - DNA, 260 bp, Unknown
  Description of Unknown: RightRegion for integrase A204 sequence
tacgagcagcatctcaggctcggcagcgtggtcgaacggctacacaccgggatgtcgtagagcggctacccgagaacgcagaaaagccccctacgcgccgtgtaagggcacgcagagggctctctggtagtctctattcagttgtggggttgcgtccgtcagcgtggacgctagaggggtttacggggcctcgtggacccgcacgtacggctgcataggcttgtcacggtaggcgtgatagcgctcggcctcctcggcgc

SEQ ID NO: 37637 - DNA, 260 bp, Unknown
  Description of Unknown: RightRegion for integrase A205 sequence
tacgagcagcatctcaggctcggcagcgtggtcgaacggctacacaccgggatgtcgtagagcggctgcccgagaacgcagaaaagccccctacgcgccgtgtaagggcacgcagagggctctctggcagtctctattcagttgtggggttgcgtccgtcagcgtggacgctagaggggtttacggggcctcgtggacccgcacgtacggctgcagaggcttgtcacggtaggcgtggtatcgctcggcctcctcggcgc

SEQ ID NO: 37638 - DNA, 260 bp, Unknown
  Description of Unknown: RightRegion for integrase A206 sequence
tacgagcagcacctcaggctcggtagcgtggtcgaacggctacacaccgggatgtcgtagagcgactaccctgagaacgcagaaaagccccctacgcgccgtgtaagggcacgcagagggctctctggtagtctctattcagttgtactgctgagtccgtcagcgtgggtgctagaggggtttacggggcctcgtggacccgcacgtacggctgcagaggcttgtcacggtaggcgtggtagcgctcggcctcctcggcg

SEQ ID NO: 37639 - DNA, 260 bp, Unknown
  Description of Unknown: RightRegion for integrase A207 sequence
tacgagcagcatctcaggctcggcagcgtggtcgaacggctacacaccgggatgtcgtagagcgactacccccgagaacgcagaaaagccccctacgcaccgtgtaagggcacgcagagggctctctggtagtctctattcagttgtgtggttgcgtccgtcagcgtggacgctagaggggtttacggggcctcgtggacccgcacgtacggctgcagaggcttgtcacggtaggcgtgatatcgctccgcctcctcggc

SEQ ID NO: 37640 - DNA, 260 bp, Unknown
  Description of Unknown: RightRegion for integrase A208 sequence
tacgagcagcatctcaggctcggcagcgtggtcgaacggctacacgccgggatgtcgtagagcggctacccgagaacgcagaaaagccccctacgcgccgtgtaagggcacgcagagggctctctggtagtctctattcagttgtggggttgcgtccgtcagcgtggacgctagaggggtttacggggcctcgtggacccgcacgtacggctgcagaggcttgtcacggtaggcgtggtatcgctcggcctcctcgacgc

SEQ ID NO: 37641 - DNA, 260 bp, Unknown
  Description of Unknown: RightRegion for integrase A209 sequence
tacgagcagcatctcaggctcggtagcgtggtcgaacggctacacgccgggatgtcgtagagcggctacccgagaacgcagaaaagccccctacgcgccgtgtaagggcacgcagagggctctctggtagtctctattcagttgtggggttgcgtccgtcagcgtggacgctagaggggtttacggggcctcgtggacccgtacgtacggctgcagaggcttgtcacggtaggcgtggtagcgctctttctcgtcggtcg

SEQ ID NO: 37642 - DNA, 260 bp, Unknown
  Description of Unknown: RightRegion for integrase A210 sequence
tacgagcagcatctcaggctcggcagcgtggtcgaacggctacacaccgggatgtcgtagagcggatacccgagaacgcagaaaagccccctacgcgccgtgtaagggcacgcagagggctctctggtagtctctattcagttgtgtggttgcgtccgtcagcgtggacgctagaggggtttacggggcctcgtggacccgcacgtacggctgcagaggcttgtcacggtaggcgtggtagcgctccgcctcctcggcgc

SEQ ID NO: 37643 - DNA, 260 bp, Unknown
  Description of Unknown: RightRegion for integrase A211 sequence
tacgagcagcatctcaggctcggcagcgtggtcgaacggctacacaccgggatgtcgtagagcggctacccgagaacgcagaaaagccccctacgcgccgtgtaagggcacgcagagggctctctggtagtctctattcagttgtggggttgcgtacgtctccgtggacgctagaggggtttacggggcctcgtggacccgcacgtacggctgcagaggcttgtcacggtaggcgtgatagcgctccgcctcctcgacgc

SEQ ID NO: 37644 - DNA, 260 bp, Unknown
  Description of Unknown: RightRegion for integrase A212 sequence
tacgagcagcatctaaggctcggcagcgtggtcgaacagctacacgccgggatgtcgtagagcggctacccgagaacgcagaaaagccccctacgcgccgtgtaagggcacgcagagggctctctggtagtctctattcagttgtggggttgcgtccgtcagcgtgtctacccagctccgcgtacggccccttgacaagctgagcgacctgagcggtggtaagaggcgcgaacgccttccgaaccgctacgagtacggct

SEQ ID NO: 37645 - DNA, 260 bp, Unknown
  Description of Unknown: RightRegion for integrase A213 sequence
tacgagcagcatctcaggctcggtagcgtggtcgaacggctacacgccgggatgtcgtagagcgactaccccgagaacgcagaaaagccccctacgcgccgtgtaagggcacgcagagggctctctggtagtctctattcagttgtggggttgcgtccgtcagcgtggacgctagaggggtttacggggcctcgtggacccgtacgtacggctgcagaggcttgtcacggtaggcgtgatagcgctcggcctcctcgacg

SEQ ID NO: 37646 - DNA, 260 bp, Unknown
  Description of Unknown: RightRegion for integrase A214 sequence
tacgagcagcatctcaggctcggcagcgtggtcgaacggctacacaccgggatgtcgtagagcggctacccccgagaacgcagaagagccccctacgggccgctagggctcgcagagggcttctccggtagtctctattcagttgtactgctgagtccgtcagcgtgggcgctagaggggttttacggggcctcgtggacccgcacgtacggctgcagaggcttgtcacggtaggcgtggtatcgctcggcctcctcggc

SEQ ID NO: 37647 - DNA, 260 bp, Unknown; identical to SEQ ID NO: 37506
  Description of Unknown: RightRegion for integrase A215 sequence

SEQ ID NO: 37648 - DNA, 260 bp, Unknown
  Description of Unknown: RightRegion for integrase A216 sequence
tacgagcagcatctcaggctcggcagcgtggtcgaacagctacacaccgggatgtcgtagagcgactacccgagaacgcagaaaagccccctacgcgccgtgtaagggcacgcagagggctctctgatagtctctattcagttgtgtggttgcgtccgtcagcgtggacgctagaggggtttacggggcctcgtggacccgcacgtacggctgcagaggcttgtcacggtaggcgtggtaacgctccgcctcctcggcgc

SEQ ID NO: 37649 - DNA, 260 bp, Unknown
  Description of Unknown: RightRegion for integrase A217 sequence
tacgagcagcatctcaggctcggcagcgtggtcgaacggctacacaccgggatgtcgtagagcggctacccgagaacgcagaaaagccccctacgcgccgtgtaagggcacgcagagggctctctggtagtctctattcagttgtggggttgcgtccgtcagcgtggacgctagaggggtttacggggcctcgtggacccgtacgtacggctgcagaggcttgtcacggtaggcgtggtagcgctcggcctcctcgacgc

SEQ ID NO: 37650 - DNA, 260 bp, Unknown
  Description of Unknown: RightRegion for integrase A218 sequence
tacgagcagcatctcaggctcggcagcgtggtcgaacagctacacaccgggatgtcgtagagcggctacccccgagaacgcagaagagccccctacgcgccgtgtaagggcacgcagagggctctctggtagtctctattcagttgtggggttgcgtccgtcagcgtggacgctagaggggtttacggggcctcgtggacccgcacgtacggctgcagaggcttgtcacggtaggcgtggtagcgctcggcctcctcggc

SEQ ID NO: 37651 - DNA, 260 bp, Unknown
  Description of Unknown: RightRegion for integrase A219 sequence
tacgagcagcacctcaggctcggcagcgtggtcgaacgactacacgccgggatgtcgtagagcggctacccgagaacgcagaaaagccccctacgcgccgtgtaagggcacgcagagggctctctggtagtctctattcagttgtggggttgcgtccgtcagcgtggacgctagaggggtttacgggtcctcgtggacccgtacgtacggctgcagaggcttgtcacggtaggcgtggtagcgctctttctcgtcggtcg

SEQ ID NO: 37652 - DNA, 260 bp, Unknown
  Description of Unknown: RightRegion for integrase A220 sequence
tacgagcagcatctcaggctcggcagcgtggtcgaacggctacacaccgggatgtcgtagagcggctacccgagaacgcagaaaagccccctacgcgccgtgtaagggcacgtagagggctctctggtagtctctattcagttgtgtggttgcgtccgtcagcgtggacgctagaggggtttacggggcctcgtggacccgcacgtacggctgcagaggcttgtcacggtaggcgtgatagcgctccgcctcctcggcgc

SEQ ID NO: 37653 - DNA, 260 bp, Unknown
  Description of Unknown: RightRegion for integrase A221 sequence
tccgaccgcgactgttcctgctgtggcaaagctgaccggggatagaatcttcattgcacgggcctcttccgtgtagtagccctctgccagtcctgcgcctaaacagctggtagggggctcttttcgttgttgtggagcgatacggtacaccatttcaagtgtgtttgcttcgggcagccgagcagcgtacatttgaaatcatgacccaaacactccgcgccctggtaggcgcacgtgtcagcgtagtccaaggtccgcag

SEQ ID NO: 37654 - DNA, 260 bp, Unknown
  Description of Unknown: RightRegion for integrase A222 sequence
tacgagcagcatctcaggctcggtagcgtggtcgaacggctacacgacgggatgtcgtagagcggctacccgagaacgcagaaaagccccctacgcgccgtgtaagggcacgcagagggctctctggtagtctctattcagttgtggggttgcgtccgtcagcgtgggcgctagaggggtttacggggcctcgtggacccgtacgtacggctgcagaggcttgtcacggtaggcgtggtaccgctcggcctcctcggcgc

SEQ ID NO: 37655 - DNA, 260 bp, Unknown
  Description of Unknown: RightRegion for integrase A223 sequence
tacgagcagcatctcaggctcggcagcgtggtcgaacagctacacaccgggatgtcgtagagcgactaccccccgagaacgcagaaaagccccctacgcgccgtgtaagggcacgcagagggctctctggtagtctctattcagttgcggggctgcgtccgtcagcgtggacgctagaggggtttacggggcctcgtggacccgtacgtacggctgcagaggcttgtcacggtaggcgtggtagcgctccgcctcctcgg

SEQ ID NO: 37656 - DNA, 260 bp, Unknown
  Description of Unknown: RightRegion for integrase A224 sequence
tacgagcagcatctcaggctcggcagcgtggtcgaacagctacacaccgggatgtcgtagagcggctacccccgagaacgcagaagagccccctacgcgccgtgtaagggcacgcagagggctctctggtagtctctattcagttgtggggttgcgtccgccagcgtggacgctagaggggtttacggggcctcgtggacccgcacgtacggctgcagaggcttgtcacggtaggcgtggtagcgctcggcctcctcggc

SEQ ID NO: 37657 - DNA, 260 bp, Unknown
  Description of Unknown: RightRegion for integrase A225 sequence
tacgagcagcatctcaggctcggcaacgtggtcgaacagctacacgccgggatgtcgtagagcgactacccgagaacgcagaaaagccccctacgcgccgtgtaagggcacgcagagggcttctccggtagtctctattcagttgtactgctgagtccgtcagcgtggacgctagaggggtttacggggcctcgtggacccgcacgtacggctgcagaggcttgtcacggtaggcgtgatagcgctccgcctcctcgacg

SEQ ID NO: 37658 - DNA, 260 bp, Unknown
  Description of Unknown: RightRegion for integrase A226 sequence
tacgagcagcatctcaggctcggcagcgtggtcgaacggctacacgccgggatgtcgtagagcgactacccccgagaacgcagaaaagccccctacgcgccgtgtaagggcacgcagaggactctctggtagtctctattcagttgtggggttgcgtccgtcagcgtggacgctagaggggtttacggggcctcgtggacccgtacgtacggctgcagaggcttgtcacggtaggcgtggtagcgctcggcctcctcggc

SEQ ID NO: 37659 - DNA, 260 bp, Unknown
  Description of Unknown: RightRegion for integrase A227 sequence
tacgagcagcatctcaggctcggcagcgtggtcgaacggctacacaccgggatgtcgtagagcgactacccccgagaacgcagaaaagccccctacgcgccgtgtaagggcacgcagagggctctctggtagtctctattcagttgtgtggttgcgtccgtcagcgtggacgctagaggggtttacggggcctcgtggacccgcacgtacggctgcagaggcttgtcacggtaggcgtgatatcgctccgcctcctcggc

SEQ ID NO: 37660 - DNA, 260 bp, Unknown
  Description of Unknown: RightRegion for integrase A228 sequence
tacgagcagcatctcaggctcggcagcgtggtcgaacggctacacgccgggatgtcgtagagcggctacccgagaatgcagaaaagccccctacgcgccgtgtaagggcacgcagagggctctctggtagtctctattcagttgtggggttgcatccgtcagcgtggacgctagaggggtttacggggcctcgtggacccgcacgtacggctgcagaggcttgtcacgataggcgtggtagcgctcggcctcctcggcgc

SEQ ID NO: 37661 - DNA, 260 bp, Unknown
  Description of Unknown: RightRegion for integrase A229 sequence
tacgagcagcatctcaggctcggcagcgtggtcgaacagctacacaccgggatgtcgtagagcggctacccgagaacgcagaaaagccccctacgcgccgtgtaaaggcacgcagagggctctctggtagtatcctattcagttgtgggtgtgcgtccgtcagcgtggacgctagaggggtttacggggcctcgtggacccgcacgtacggctgcagaggcttgtcacggtaggcgtggtagcgctcggcctcctcggcg

SEQ ID NO: 37662 - DNA, 260 bp, Unknown
  Description of Unknown: RightRegion for integrase A230 sequence
tacgagcagcatctcaggctcggcagcgtggtcgaacagctacacaccgggatgtcgtagagcggccacccgagaacgcagaaaagccccctacgcgccgtgtaagggcacgcagagggctctctggtagtctctattcagttgtggggttgcgtccgtcagcgtggacgctagaggggtttacggggcctcgtggacccgtacgtacggctgcagaggcttgtcacggtaggcgtggtatcgctccgcctcctcggcgc

SEQ ID NO: 37663 - DNA, 260 bp, Unknown
  Description of Unknown: RightRegion for integrase A231 sequence
tacgagcagcatctcaggctcggcagcgtggtcgaacggctacacgccgggatgtcgtagagcggctacccgagaacgcagaaaagccccctacgcgccgtgtaagggcacgcagagggctctctggtagtctctattcagttgtactgctgagtccgtcagcgcggacgctagaggggtttacggggcctcgtggacccgcacgtacggctgcagaggcttgtcacggtaggcgtgatagcgctcggcctcctcgacgc

SEQ ID NO: 37664 - DNA, 260 bp, Unknown
  Description of Unknown: RightRegion for integrase A232 sequence
tacgagcagcatctcaggctcggcagcgtggtcgaacggctacacgccgggatgtcgtagagcggctacccgagaacgcagaaaagccccctacgcgccgtgtaagggcacgcagagggctctctggtagtctctattcagttgtggggttgcgtccgtcagcgtggacgctagaggggtttacggggcctcgtggacccgtacgtacggctgcagaggcttgtcacggtaggcgtgatagcgctccgcctcctcggcgc

SEQ ID NO: 37665 - DNA, 260 bp, Unknown; identical to SEQ ID NO: 37510
  Description of Unknown: RightRegion for integrase A233 sequence

SEQ ID NO: 37666 - DNA, 260 bp, Unknown; identical to SEQ ID NO: 24353
  Description of Unknown: RightRegion for integrase A234 sequence

SEQ ID NO: 37667 - DNA, 260 bp, Unknown; identical to SEQ ID NO: 37644
  Description of Unknown: RightRegion for integrase A235 sequence

SEQ ID NO: 37668 - DNA, 260 bp, Unknown
  Description of Unknown: RightRegion for integrase A236 sequence
gtccggaccgtacctgttcgaccttcgcaaccaacgatgctgacacccgccctcgggtcggtcttcggaccggctcgggggctcctttttttgtgcccaaatcccatgcacgatcacgcatgtatcagtattgggggaacgcgatattcgaggagtagaacatcaccttcaccaaattcatgtatcctaccttcgtgcgtgtgttggggagactgcgtctgtcgaggtcaacggaggaatccacctcgattgagaggcaa

SEQ ID NO: 37669 - DNA, 260 bp, Unknown
  Description of Unknown: RightRegion for integrase A237 sequence
tacgagcagcatctcaggctcggcagcgtggtcgaacggctacacaccgggatgtcgtagagcgactgcccccgagaacgcagaaaagccccctacgcgccgtgtaagggcacgcagagggctctctggtagtctctattcagttgtggggttgcgtacgtcagcgtggacgctagaggggtttacggggcctcgtggacccgtacgtacggctgcagaggcttgtcacggtaggcgtggtagcgctcggcctcctcggc

SEQ ID NO: 37670 - DNA, 260 bp, Unknown
  Description of Unknown: RightRegion for integrase A238 sequence
tacgagcagcatctcaggctcggcagcgtggtcgaacggctacacgccgggatgtcgtagagcgactacccccgagaacgcagaaaagccccctacgcgccgtgtaagggcacgcagagggctctctggtagtctctattcagttgtggggttgcgtccgtcagcgtggacgctagaggggtttacggggcctcgtggacccgcacgtacggctgcagaggcttgtcacggtaggcgtgatagcgctcggcctcctcggc

SEQ ID NO: 37671 - DNA, 260 bp, Unknown
  Description of Unknown: RightRegion for integrase A239 sequence
gttcggaccgtacctgttcgaccttcgcaaccaacgatgctgacacccgccctcgggtcggtcttcggaccggctcgggggctcctttttttgtgcccaaatcccatgcacgatcacgcatgtatcagtattgggggaacgcgatattcgaggagtagaacatcaccttcaccaaattcatgtatcctaccttcgtgcgtgtgttggggagactgcgtctgtcgaggtcaacggaggaatccacctcgattgagaggcaa

SEQ ID NO: 37672 - DNA, 260 bp, Unknown
  Description of Unknown: RightRegion for integrase A240 sequence
tacgagcagcatctcaggctcggcagcgtggtcgaacggctacacaccgggatgtcgtagagcggctacccgagaacgcagaaaagccccctacgcgccgtgtaagggcacgcagagggctctctggtagtctctattcagttgtgtggttgcgtccgtcagcgtggacgctagaggggtttacggggcctcgtggacccgtacgtacggctgcagaggcttgtcacggtaggcgtggtagcgctccgcctcctcgacgc

SEQ ID NO: 37673 - DNA, 260 bp, Unknown
  Description of Unknown: RightRegion for integrase A241 sequence
tacgagcagcacctccggctcggtagcgtggtcgaacagctacacaccgggatgtcgtagagcgactacccggagaacgcagaaaagccccctacgcgccgtgtaagggcacgcagagggctctctggtagtctctattcagttgtggggttgcgtccgtcagcgcggacgctagaggggtttacggggcctcgtggacccgtacgtacggctgcagaggcttgtcacggtaggcgtggtagcgctcggcctcctcgacg

SEQ ID NO: 37674 - DNA, 260 bp, Unknown
  Description of Unknown: RightRegion for integrase A242 sequence
tacgagcagcatctcaggctcggcagcgtggtcgaacggctacacaccgggatgtcgtagagcggctacccgagaacgcagaaaagccccctacgcgccgtgtaagggcgcgcagagggctctctggtagtctctattcagttgtggggttgcgtccgtcagcgtggacgctagaggggtttacggggcctcgtggacccgcacgtacggctgcagaggcttgtcacggtaggcgtggtagcgttccgcctcctcggcgc

SEQ ID NO: 37675 - DNA, 260 bp, Unknown
  Description of Unknown: RightRegion for integrase A243 sequence
tacgagcagcatctcaggctcggcagcgtggtcgaacggctacacaccgggatgtcgtagatcgactacccgagaacgcagaaaagccccctacgcgccgtgtaagggcacgcagagggctctctggtagtctctattcagttgtggggttgcgtccgtcagcgtggacgctagaggggtttacggggcctcgtggacccgtacgtacggctgcagaggcttgtcacggtaggcgtgatagcgctcggactcctcggcgc

SEQ ID NO: 37676 - DNA, 260 bp, Unknown; identical to SEQ ID NO: 37650
  Description of Unknown: RightRegion for integrase A244 sequence

SEQ ID NO: 37677 - DNA, 260 bp, Unknown
  Description of Unknown: RightRegion for integrase A245 sequence
tacgagcagcatctcaggctcggcagcgtggtcgaacagctacacgccgggatgtcgtagagcggctacccgagaacgcagaaaagccccctacgcgccgtgtaagggcacgcagagggctctctggtagtctctattcagttgtggggttgcgtccgtcagcgtggacgctagagggggtttacggggcctcgtggacccgcacgtacggctgcagaggcttgtcacggtaggcgtggtatcgctcggcctcctcggcg

SEQ ID NO: 37678 - DNA, 260 bp, Unknown
  Description of Unknown: RightRegion for integrase A246 sequence
tacgagcagcatctcaggctcggcagcgtggtcgagcggctacacaccgggatgtcgtagagcgactacccgagaacgcagaaaagccccctacgcgccgtgtaagggcacgcagagggctctctggcagtctctattcagttgtggggttgcgtccgtcagcgtggacgctagaggggtttacggggcctcgtggacccgcacgtacggctgcagaggcttgtcacggtaggcgtggtagcgttccgcctcctcggcgc

SEQ ID NO: 37679 - DNA, 260 bp, Unknown
  Description of Unknown: RightRegion for integrase A247 sequence
tacgagcagcatctcaggctcggcagcgtggtcgaacggctacacgccgggatgtcgtagagcggctacccgagaacgcagaaaagccccctacgcgccgtgtaagggcacgcagagggctctctggtagtctctattcagttgtgtggttgcgtccgtcagcgtggacgctagaggggtttacggggcctcgtggacccgcacgtacggctgcagaggcttgtcacggtaggcgtggtagcgctcggcctcctcggcgc

SEQ ID NO: 37680 - DNA, 260 bp, Unknown; identical to SEQ ID NO: 37656
  Description of Unknown: RightRegion for integrase A248 sequence

SEQ ID NO: 37681 - DNA, 260 bp, Unknown
  Description of Unknown: RightRegion for integrase A249 sequence
tacgagcagcatctcaggctcggcagcgtggtcgaacggctacacaccgggatgtcgtagagcgactacctgagaatgcagaaaagccccctacgcgccgtgtaagggcacgcagagggctctctggtagtctctattcagttgtggggttgcgtccgtcagcgtggacgctagaggggtttacggggcctcgtggacccgcacgtacggctgcagaggcttgtcacggtaggcgtggtagcgctcggcctcctcggcgc

SEQ ID NO: 37682 - DNA, 260 bp, Unknown
  Description of Unknown: RightRegion for integrase A250 sequence
tacgagcagcacctcaggctcggcagcgtggtcgaacagctacacgccgggatgtcgtagagcgactaccccccgagaacgcagaaaagccccctacgcgccgctagggcacgcagagggcttctccggtagtctctattcagttgtgggtgtgcgtccgtctccgtggacgctagaggggtttacggggcctcgtggacccgcacgtacggctgcagaggcttgtcacggtaggcgtggtagcgctcggcctcctcggc

SEQ ID NO: 37683 - DNA, 260 bp, Unknown
  Description of Unknown: RightRegion for integrase A251 sequence
tccgaccgcgactgttgctgctgcggcaaagctgaccggggatagaatcttcattgcacgggcctcttccgtgtagtagccctctgccagtcctgcgcctaaacagctggtagggggctcttttcgttgttgtggagcgatacggtacaccatttcaagtgtgtttgcttcgggcaaccgagcagcgtacatttgaaatcatgacccaaacactccgcgccctggtaggcgcacgtgtcagcgtagtccaaggtccgcag

SEQ ID NO: 37684 - DNA, 260 bp, Unknown
  Description of Unknown: RightRegion for integrase A252 sequence
tacgagcagcatctcaggctcggcagcgtggtcgaacggctacacgccgggatgtcgtagagcggctacccgagaacgcagaaaagccccctacgcgccgtgtaagggcacgcagagggctctctggtagtctctattcagttgtgtggttgcgtccgtcagcgtggacgctagaggggtttacggggcctcgtggacccgtacgtacggctgcagaggcttgtcacggtaggcgtggtagcgctcggcctcctcggcgc

SEQ ID NO: 37685 - DNA, 260 bp, Unknown
  Description of Unknown: RightRegion for integrase A253 sequence
tccgaccgcgactgttcctgctgtggcaaagctgaccggggatagaatcttcattgcacgggcctcttccgtgtagtagccctctgccagtcctgcgcctaaacagctggtagggggctcttttcgttgttgtggagcgatacggtacaccatttcaagtgtgtttgcttcgggcaaccgagcagcgtacatttgaaatcatgacccaaacactccgcgccctggtaggcgcacgtgtcagcgtagtccaaggtccgcag

SEQ ID NO: 37686 - DNA, 260 bp, Unknown
  Description of Unknown: RightRegion for integrase A254 sequence
tacgagcagcatctcaggctcggcagcgtggtcgaacggctgcacaccgggatgtcgtagagcggctacccgagaacgcagaagagccccctacgcgccgtgtaagggcacgcagagggctctctggtagtctctattcagttgtggggttgcgtccgtcagcgtggacgctagaggggtttacggggcctcgtggacccgcacgtacggctgcagaggcttgtcacggtaggcgtggtatcgctcggcctcctcggcgc

SEQ ID NO: 37687 - DNA, 260 bp, Unknown
  Description of Unknown: RightRegion for integrase A255 sequence
tacgagcagcatctcaggctcggcagcgtggtcgaacagctacacaccgggatgtcgtagagcgcctaccctgagaatgcagaaaagccccctacgcgccgtgtaagggcacgtagagggctctctggtagtctctattcagttgtggggttgcgtccgtcagcgtggacgctagaggggtttacgggtcctcgtggacccgtacgtacggctgcagaggcttgtcacggtaggcgtggtagcgctccgcctcctcggcg

SEQ ID NO: 37688 - DNA, 260 bp, Unknown
  Description of Unknown: RightRegion for integrase A256 sequence
tacgagcagcatctcaggctcggcagcgtggtcgaacagctacacgccgggatgtcgtagagcggctacccgagaacgcagaaaagccccctacgcgccgtgtaagggcacgcagagggctctctggtagtctctattcagttgtggggttgcgtccgtcagcgtggacgctagaggggtttacggggcctcgtggacccgcacgtacggctgcagaggcttgtcacggtaggcgtggtagcgctcggcctcctcggcgc

SEQ ID NO: 37689 - DNA, 260 bp, Unknown
  Description of Unknown: RightRegion for integrase A257 sequence
tacgagcagcacctcaggctcggcggcgtggtcgaacagctacacaccgggatgtcgtagagcgactaccctgagaacgcagaaaaaccccctacgcgccgtgtaagggcacgcagagggctctctggtagtctctattcagttgtgcggttgcgtccgtcagcgtggacgctagaggggtttacggggcctcgtggacccgtacgtacggctgcagaggcttgtcacggtaggcgtggtagcgctcggcctcctcgacg

SEQ ID NO: 37690 - DNA, 260 bp, Unknown
  Description of Unknown: RightRegion for integrase A258 sequence
tccgaccgcgactgttcctgctgtggcaaagctgaccggggatagaatcttcattgcacgggcctcttccgtgtagtagccctctgccagtactgcgcctaaacagctggtagggggctcttttcgttgttgtggagcgatacggtacaccatctcaagtgtgtttgcttcgggcaaccgagcagcgtacatttgaaatcatgacccaaacactccgcgccctggtaggcgcacgtgtcagcgtagtccaaggtccgcag

SEQ ID NO: 37691 - DNA, 260 bp, Unknown
  Description of Unknown: RightRegion for integrase A259 sequence
tacgagcagcatctcaggctcggcagcgtggtcgaacagctgcacgccgggatgtcgtagagcgactacccgagaacgcagaaaagccccctacgcgccgtgtaagggcacgcagagggctctctggtagtctctattcagttgtggggttgcgtccgtcagcgtggacgctagaggggtttacggggcctttccagcctgacgtccgcgccactcctgtaagggtgtgtgagcagtgcagtacgggtctacccggctgc

SEQ ID NO: 37692 - DNA, 260 bp, Unknown
  Description of Unknown: RightRegion for integrase A260 sequence
tacgagcagcatctcaggctcggcagcgtggtcgaacgactacacaccgggatgtcgtagagcggctacccgagaacgcagaaaagccccctacgcgccgtgtaagggcacgcagagggctctctggtagtctctattcagttgtggggttgcgtccgtcagcgtggacgctagaggggtttacggggcctcgtggacccgcacgtacggcggcagaggcttgtcacggtaggcgtggtagcgctctttctcgtcggaga

SEQ ID NO: 37693 - DNA, 260 bp, Unknown
  Description of Unknown: RightRegion for integrase A261 sequence
tacgagcagcatctcaggctcggcagcgtggtcgaacagctacacgccgggatgtcgtagagcggctacctgagaacgcagaaaagccccctacgcgccgtgtaagggcacgcagagggctctctggtagtctctattcagttgtggggttgcgtccgtcagcgtggacgctagaggggtttacgggggcctttccagcctgacgggcgcgcccgcctataagggtgtgtgagcagtgcagtgcgggtctacccagctgc

SEQ ID NO: 37694 - DNA, 260 bp, Unknown
  Description of Unknown: RightRegion for integrase A262 sequence
tacgagcagcatctcaggctcggcagcgtggtcgaacggctacacaccgggatgtcgtagagcggctacccgagaacgcagaaaagccccctacgcgccgtgtaagggcacgcagagggctctctggtagtctctattcagttgtgtggttgcgtccgtcagcgtggacgctagaggggtttacggggcctcgtggacccgcacgtacggctgcagaggcttgtcacggtaggcgtggtagcgctcggcctcctcggcgc

SEQ ID NO: 37695 - DNA, 260 bp, Unknown
  Description of Unknown: RightRegion for integrase A263 sequence
acagtccccgccgtcgcagaccggagcggggtgatctcccgtagaatttccattgcacctggtcctttcaggtgtaacgcctcctaccagtcctgcgcctaaacagctggtagggggctcttttcgttgttgtggagcgatacggtacaccatttcaagtgtgtttgcttcgggcaaccgagcagcgtacatttgaaatcatgacccaaacactccgcgccctggtaggcgcacgtgtcagcgtagtccaaggtccgcag

SEQ ID NO: 37696 - DNA, 260 bp, Unknown
  Description of Unknown: RightRegion for integrase A264 sequence
tacgagcagcatctcaggctcggtagcgtggtcgaacggctacacaccgggatgtcgtagagcggctacccgagaacgcagaaaagccccctacgcgccgtgtaagggcacgcagagggctctctggtagtctctattcagttgtactgctgagtccgtcagcgtggacgctagaggggtttacggggcctcgtggacccgaacgtacggctgcagaggcttgtcacggtaggcgtgatagcgctccgcctcctcggcgc

SEQ ID NO: 37697 - DNA, 260 bp, Unknown
  Description of Unknown: RightRegion for integrase A265 sequence
tatgagcagcatctcaggctcggtagcgtggtcgaacagctacacaccgggatgtcgtagagcgactaccctgagaacgcagaaaagccccctacgcgccgtgtaagggcgcgcagagggctctctggtagtctctattcagttgcggggttgcgtccgtcagcgtggacgctagaggggtttacggggcctcgtggacccgtacgtacggctgcagaggcttgtcacggtaggcgtggtagcgctctgcctcctcggcg

SEQ ID NO: 37698 - DNA, 260 bp, Unknown
  Description of Unknown: RightRegion for integrase A266 sequence
tacgagcagcatctcaggctcggcagcgtggtcgagcagctacacgccgggatgtcgtagagcggctacccgagaacgcagaaaagccctctacgcgccgtgtaagggcgcgcagagggctctctggcagtctctattcagttgtggggttgcgtccgtcagcgtggacgctagaggggtttacggggcctcgtggacccgcacgtacggctgcagaggcttgtcacggtaggcgtggtagcgctcggcctcctcggcgc

SEQ ID NO: 37699 - DNA, 260 bp, Unknown
  Description of Unknown: RightRegion for integrase A267 sequence
tacgagcagcatctcaggctcggcagcgtggtcgagcagctacacgccgggatgtcgtagagcggatacccgagaacgcagaaaagccccctacgcgccgtgtaagggcacgcagagggctctctggtagtctctattcagttgtggggttgcgtccgtcagcgtggacgctagaggggtttacggggcctcgtggacccgtacgtacggctgcagaggcttgtcacggtaggcgtggtagcgctcggcctcctcggcgc

SEQ ID NO: 37700 - DNA, 260 bp, Unknown
  Description of Unknown: RightRegion for integrase A268 sequence
tacgagcagcatctcaggctcggcaacgtggtcgaacggctacacaccgggatgtcgtagagcgactacccgagaacgcagaaaagccccctacgcgccgtgtaagggcacgcagagggctctctggcagtctctattcagttgtggggttgcgtccgtcagcgtggacgctagaggggtttacggggcctcgtggacccgcacgtacggctgcagaggcttgtcacggtaggcgtggtagcgctctttctcgtcggtcg

SEQ ID NO: 37701 - DNA, 260 bp, Unknown; identical to SEQ ID NO: 37698
  Description of Unknown: RightRegion for integrase A269 sequence

SEQ ID NO: 37702 - DNA, 260 bp, Unknown
  Description of Unknown: RightRegion for integrase A270 sequence
gtccagcccagccacgtctccttcgagatggggctacttgtgctggcacgacacggtgagtggctaggtccgtgggtcgcattgggacaaagcccgcagggctagggggacaaggcgagggccacaggtctagccgcccgtagggcgtccttacggtcaggggagcccccgtcaggggtcagtctccaggagcggtagaagtgccaaagtacgatggacgtatgcgtgtgctcggtcgggttcgtctctctcggttccaa

SEQ ID NO: 37703 - DNA, 260 bp, Unknown
  Description of Unknown: RightRegion for integrase A271 sequence
tacgagcagcatctcaggctcggcagcgtggtcgagcagctacacgccgggatgtcgtagagcggctacccgagaacgcagaaaagccccctacgcgccgtgtaagggcgcgcagagggctctctggcagtctctattcagttgtggggttgcgtccgtcagcgtggacgctagaggggtttacggggcctcgtggacccgcacgtacggctgcagaggcttgtcacggtaggcgtggtagcgctcggcctcctcggcgc

SEQ ID NO: 37704 - DNA, 260 bp, Unknown
  Description of Unknown: RightRegion for integrase A272 sequence
tacgagcagcatctcaggctcggcagcgtggtcgagcggctacacaccgggatgtcgtagagcgactgcccccgagaacgcagaaaagccccctacgcgccgtgtaagggcacgcagagggctctctggtagtctctattcagttgtggggttgcgtacgtcagcgtggacgctagaggggtttacggggcctcgtggacccgcacgtacggttgcagaggcttgtcacggtaggcgtggtatcgctcggcctcctcggc

SEQ ID NO: 37705 - DNA, 260 bp, Unknown
  Description of Unknown: RightRegion for integrase A273 sequence
tacgagcagcatctcaggctcggcagcgtggtcgagcggctacacaccgggatgtcgtagagcgactaccctgagaacgcaagaaaagccccctacgcgccgtgtaagggcacgcagagggctctctggtagtctctattcagttgtggggttgcgtccgtcagcgtggacgctagaggggtttacggggcctcgtggacccgcacgtacggcggcagaggcttgtcacggtaggcgtgatagcgctccgcctcctcggc

SEQ ID NO: 37706 - DNA, 260 bp, Unknown
  Description of Unknown: RightRegion for integrase A274 sequence
tacgagcagaatctcaggctcggcaacgtggtcgaacggctacacaccgggatgtcgtagagcgactacccgagaacgcagaaaagccccctacgcgccgtgtaagggcacgcagagggctctctggcagtctctattcagttgtggggttgcgtacgtcagcgtggacgctagaggggtttacggggcctcgtggacccgtacgtacggctgcagaggcttgtcacggtaggcgtggtagcgctcggcctcctcggcgc

SEQ ID NO: 37707 - DNA, 260 bp, Unknown
  Description of Unknown: RightRegion for integrase A275 sequence
tacgagcagcatctcaggctcggcagcgtggtcgaacggctacacaccgggatgtcgtagagcgactacccgagaacgcagaaaagccccctacgcgccgtgtaagggcacgcagagggctctctggtagtctctattcagctgtgggtgtgcgtccgtctccgtggacgctagaggggtttacggggcctcgtggacccgcacgtacggttgcagaggcttgtcacggtaggcgtggtatcgctcggcctcctcggcgc

SEQ ID NO: 37708 - DNA, 260 bp, Unknown
  Description of Unknown: RightRegion for integrase A276 sequence
agtccagcccagccacgtctccttcgagatggggctacttgtgctggcctgacacggtgaggggctaggtccgtgggtcgcattgggacaagcccgcagggctagggggacaaagcgagggccaagagtctagtcgcccgaagggcgtccttacggtcaggggagcccccgtcaggggccaatctccaggagccgttcctatgccaacgtacgatagatccatgcgcgtgataggccgactgagaatctcccgacaaacc

SEQ ID NO: 37709 - DNA, 260 bp, Unknown
  Description of Unknown: RightRegion for integrase A277 sequence
aagctgaacgccagaccgcccacggcaatcgtgcctgccgtagcgacgttgacggacgatagactcttcatgcaccgctcctatcggtgtatcgcctctggtctgttcgcgcaggccaggggctcattctctcagtgaagaatcccgagaatcgggagcccaagtcttatcattcttcactctctgttatgctggctgacatgcgagttcttgggagactcaggatcagccgagccacagaggaatctaccagcatcgag

SEQ ID NO: 37710 - DNA, 260 bp, Unknown
  Description of Unknown: RightRegion for integrase A278 sequence
gagaacgccagacctccgaccgccacggttccggccgtcgcgacacgcacgggggatagactcagcactgcaccagctcctatctggtgtaacgcccctggtctgttcacgcaggccaggggctcttttggttagtgaagaatcccgaaaaacgggagcccgagtttcaacattcttctctccttgctactgtctctgacatgcgagttcttggaagattgcgaatctcacgagccactgaggaatctaccagcatcgag

SEQ ID NO: 37711 - DNA, 260 bp, Unknown; identical to SEQ ID NO: 37624
  Description of Unknown: RightRegion for integrase A279 sequence

SEQ ID NO: 37712 - DNA, 260 bp, Unknown
  Description of Unknown: RightRegion for integrase A280 sequence
gagaacgccagacctccgaccgccacggttccggccgtcgcgacacgcacgggggatagactcagcactgcaccagctcctatctggtgtaacgcccctggtctgttcacgcaggccaggggctcttttggttagtgaagaatcccgaaaaacgggagcccgagtttcaacattcttctctccttgctactgtgtctgacatgcgagttcttggaagattgcgaatttcacgagccactgaggaatctaccagcatcgag

SEQ ID NO: 37713 - DNA, 260 bp, Unknown
  Description of Unknown: RightRegion for integrase A281 sequence
agtccagcccagccacgtctccttcgagatggggctacttgtgctggcctgacacggtgaggggctaggtccgtgggtcgcattgggacaagcccgcagggctagggggacaaagcgagggccaagagtctagccgcccgaagggcgtccttacggtcaggggagcccccgtcaggggccaatctccaggagccgttccgatgccaacgtacgatagatccatgcgcgtgataggccgactgagaatctcccggcaaacc

SEQ ID NO: 37714 - DNA, 260 bp, Unknown
  Description of Unknown: RightRegion for integrase A282 sequence
agaacgccagagcgccgaccgccacggttccggccgtcgcgacacgcacgggggatagaatcgacattgcacgagctcctatctcgtgtaccgcccctggtctgttcgcgcaggccaggggctcttttgacctagtgaataatcccgaaaatcgggagcccgagttttatcattcttcactccttggtaccatgtctgacatgcgagttcttggaagattgcgaatttcccgagccactgaggaatctaccagcatcgag

SEQ ID NO: 37715 - DNA, 260 bp, Unknown; identical to SEQ ID NO: 37627
  Description of Unknown: RightRegion for integrase A283 sequence

SEQ ID NO: 37716 - DNA, 260 bp, Unknown
  Description of Unknown: RightRegion for integrase A284 sequence
agtccagcccagccacgtctcaatcgagatggggctacttgtgctggcctgacacggtgaggggctaggtccgtgggtcgcattgggacaagcccgcagggctagggggacaaagcgagggccaagagtctagtcgcccgaagggcgtccttacggtcaggggagcccccgtcaggggccaatctccaggagccgttcctatgccaacgtacgatagatccatgcgcgtgataggccgactgagaatctcccgacaaacc

SEQ ID NO: 37717 - DNA, 260 bp, Unknown; identical to SEQ ID NO: 37627
  Description of Unknown: RightRegion for integrase A285 sequence

SEQ ID NO: 37718 - DNA, 260 bp, Unknown
  Description of Unknown: RightRegion for integrase A286 sequence
cgagaacgccagacctccgaccgccacggttccggccgtcgcgacacgcacgggggatagactcagcactgcaccagctcctatctggtgtaacgcccctggtctgttcacgcaggccaggggctctttcgttagtgaagaatcccgaaaaacgggagcccgagtttcaacattcttctctccttgctactgtctctgacatgcgagttcttggaagattgcgaatctcacgagccactgaagaatctaccagcatcgag

SEQ ID NO: 37719 - DNA, 260 bp, Unknown; identical to SEQ ID NO: 37627
  Description of Unknown: RightRegion for integrase A287 sequence

SEQ ID NO: 37720 - DNA, 260 bp, Unknown; identical to SEQ ID NO: 37624
  Description of Unknown: RightRegion for integrase A288 sequence

SEQ ID NO: 37721 - DNA, 260 bp, Unknown
  Description of Unknown: RightRegion for integrase A289 sequence
gtccagcccagccacgtctccttcgagatggggctacttgtgctggcacgacacggtgagtggctaggtccgtgggtcgcattgggacaaagcccgcagggctagggggacaaggcgagggccacaggtctagccgcccgtagggcgtccttacggtcaggggagcccccgtcaggggtcagtctccaggagccgcttcaatgccaacgtacgatagatccatgcgcgtgataggccgactaagaatctcccgtcagtcc

SEQ ID NO: 37722 - DNA, 260 bp, Unknown
  Description of Unknown: RightRegion for integrase A290 sequence
gagaacgccagacctccgaccgccacggttccggccgtcgcgacacgcacgggggatagactcagcactgcaccagctcctatctggtgtaacgcccctggtctgttcacgcaggccaggggctcttttggttagtgaagaatcccaaaaaacgggagcccgagtttcaacattcttctctccttgctactgtctctgacatgcgagttcttggaagattgcgaatctcacgagccactgaggaatctaccagcatcgag

SEQ ID NO: 37723 - DNA, 260 bp, Unknown
  Description of Unknown: RightRegion for integrase A291 sequence
ccgttgctgcaaaaatcggggatagaatcttcatgcacctggccctttcaggtgtaccgcccccttcctgttaccgcaggtagggggctctttttctgttgacggtcggttacgctaccacagttgtcaaagtctaaagatggggaactcaatattcatgctttgcgaaagcgctgttctcacggctacactcctctgacatgcgggttcttgggagaatacgactctccagaatgatggaggagtctaccagtgtggaa

SEQ ID NO: 37724 - DNA, 260 bp, Unknown
  Description of Unknown: RightRegion for integrase A292 sequence
ccgttgctgcaaaaatcggggatagaatcttcatgcacctggccctttcaggtgtaccgccctctgcctgttaccgcaggtagggggctctttttctgttgacggtcggttacgctaccacagttgtcaaagcctaaaaatggggaactcgatattcatgctttgcgaaagcgctgttctcacggctacactcctctgacatgcgggttcttgggagaatacgactctccagaatgatggaggagtctaccagtgtggaa

SEQ ID NO: 37725 - DNA, 260 bp, Unknown
  Description of Unknown: RightRegion for integrase A293 sequence
ccgttgctgcaaaaatcggggatagaatcttcatgcacctggccctttcaggtgtaccgccctctgcctgttaccgcaggtagggggctctttttctgttgacggtcggttacgctaccacagttgtcaaagcctaaagatggggaactcgatattcatgctttgcgaaagcgctgttctcacggctacactcctctgacatgcgggttcttgggagaatacgactctccagaatgatggaggagtctaccagtgtggaa

SEQ ID NO: 37726 - DNA, 260 bp, Unknown; identical to SEQ ID NO: 37724
  Description of Unknown: RightRegion for integrase A294 sequence

SEQ ID NO: 37727 - DNA, 260 bp, Unknown; identical to SEQ ID NO: 37724
  Description of Unknown: RightRegion for integrase A295 sequence

SEQ ID NO: 37728 - DNA, 260 bp, Unknown
  Description of Unknown: RightRegion for integrase A296 sequence
ccgttgctgcaaaaatcggggatagaatcttcatgcacctggccctttcaggtgtaccgccctctgcctgttaccgcaggtagggggctctttttctgttgacggtcggttacgttaccacagttgtcaaagcctaaagatggggaactcgatattcatgctttgcgaaagcgctgttctcacggctacactcctctgacatgcgggttcttgggagaatacgactctccagaatgatggaggagtctaccagtgtggaa

SEQ ID NO: 37729 - DNA, 260 bp, Unknown; identical to SEQ ID NO: 37724
  Description of Unknown: RightRegion for integrase A297 sequence

SEQ ID NO: 37730 - DNA, 260 bp, Unknown; identical to SEQ ID NO: 37725
  Description of Unknown: RightRegion for integrase A298 sequence

SEQ ID NO: 37731 - DNA, 260 bp, Unknown; identical to SEQ ID NO: 37725
  Description of Unknown: RightRegion for integrase A299 sequence

SEQ ID NO: 37732 - DNA, 260 bp, Unknown
  Description of Unknown: RightRegion for integrase A300 sequence
ccatgcctgcccggacgaaactccgttgttcgccgccaggtccgacagggccgtgaacgacagcgagaacgccaatcctccgaccagaatggtgcctgcggtcgctgctcctacgggactgaaaaccctcactgaactggcctttcgtcgtgtatcaagtgtgttgtgttccagcaccccagtagtctacacttgagactatggccaaacaactaagagccctggtgggagcacgtgtcagtgtagttcagggaccacag

SEQ ID NO: 37733 - DNA, 260 bp, Unknown
  Description of Unknown: RightRegion for integrase A301 sequence
tacgagcagcacctcaggctcggtagcgtggtcgaacggctacacaccgggatgtcgtagagcgactaccctgagaacgcagaaaagccccctacgggccgctagggctcgcagagggcttctccggtagtctctattcagttgtactgctgagtccgtcagcgtgggcgctagaggggtttacggggcctcgtggacccgcacgtacggctgcagaggcttgtcacggtaggcgtggtagcgctccgcctcctcggcgc

SEQ ID NO: 37734 - DNA, 260 bp, Unknown; identical to SEQ ID NO: 37654
  Description of Unknown: RightRegion for integrase A302 sequence

SEQ ID NO: 37735 - DNA, 260 bp, Unknown; identical to SEQ ID NO: 37661
  Description of Unknown: RightRegion for integrase A303 sequence

SEQ ID NO: 37736 - DNA, 260 bp, Unknown
  Description of Unknown: RightRegion for integrase A304 sequence
atcaaggtctggcatctggtcgccgagcacctcaaccccgacctgatccccgacgtgtaaacgcccctgtgcgtccacggcgacgccggaagggtctgaggagtgcgcctagcgccgccaagatgcgccggggatgctgcccataacggtcgcgtcacgatccatagcgacgaaaggctccttccgcgcgaggtatcatatttcgtccatgacgatctgacgatactttcgtcatttctctatccagcctctaggctctc

SEQ ID NO: 37737 - DNA, 260 bp, Unknown
  Description of Unknown: RightRegion for integrase A305 sequence
ttcgagatggggctacttgtgctggcacgacacggtgagtggctaggtccgtgggtcgcattgggacaaagcccgcagggctagggggacaaggcgagggccaagggtctagccgcccgtagggcgtccttacggtcaggggagcccccgtcaggggtcagtctccaggagccgttccaatgccaacgtacgatagatccatgcgcgtgataggccgactaagaatctcccgacagtccgaggagtctacgtcgatcgac

SEQ ID NO: 37738 - DNA, 260 bp, Unknown
  Description of Unknown: RightRegion for integrase A306 sequence
tacgagcagcatctcaggctcggcagcgtggtcgaacggctacacaccgggatgtcgtagagcggctacccgagaacgcagaaaagccccctacgcgccgtgtaagggcacgcagagggctctctggtagtctctattcagttgtgtggttgcgtccgtcagcgtggacgctagaggggtttacggggcctcgtggacccgcacgtacggctgcagaggcttgtcacggtaggcgtggtagcgctctttctcgtcggaga

SEQ ID NO: 37739 - DNA, 260 bp, Unknown; identical to SEQ ID NO: 37698
  Description of Unknown: RightRegion for integrase A307 sequence

SEQ ID NO: 37740 - DNA, 260 bp, Unknown
  Description of Unknown: RightRegion for integrase A308 sequence
tgttaccgcaggtagggggctttttctgttgtcggacggctacgctaccacagttcgcaaagcctcaaaatcgggaactcgatattcatgctttgtgaaagtgctgtcctcatgcggaactgtaacacgttctagtcgttacaacctcgcatcggtgtttcgatcttcagacgttgcggacctttgatactgtacctgacatgcgagttcttggaagaatacgactctcgcgggtcatggaggaatcgacatcggtcgag

SEQ ID NO: 37741 - DNA, 260 bp, Unknown
  Description of Unknown: RightRegion for integrase A309 sequence
tgttaccgcaggtagggggctttttctgttgtcggacggttacgctaccacagttcgcaaagcctcaaaatcgggaactcgatattcatgctttgtgaaagtgctgtcctcatgcggaactgtaacacgttctagttgttacaacctcacatcggtgtttcgatcttcagacgttgcggacctttgatactgtacctgacatgcgagttcttggaagaatacgactctcgcgggtcatggaagaatcgacatcggtcgag

SEQ ID NO: 37742 - DNA, 260 bp, Unknown; identical to SEQ ID NO: 37740
  Description of Unknown: RightRegion for integrase A310 sequence

SEQ ID NO: 37743 - DNA, 260 bp, Unknown
  Description of Unknown: RightRegion for integrase A311 sequence
tgttaccgcaggtagggggctttttctgttgtcggacggctacgctaccacagttcgcaaagcctcaaaatcgggaactcgatattcatgctttgtgaaagtgctgtcctcatgcggaactgtaacacgttctagtcgttacaacctcgcatcggtgtttcgatcttcagacgttgcggacctttgatactgtacctgacatgcgagttcttggaagaatacgactctcgcgggtcatggaggaatcgacatcagtcgag

SEQ ID NO: 37744 - DNA, 260 bp, Unknown
  Description of Unknown: RightRegion for integrase A312 sequence
tgttaccgcaggtagggggctttttctgttgtcggacggctacgctaccacagttcgcaaagcctcaaaatcgggaactcgatattcatgctttgtgaaagtgctgtcctcatggggaactgtaacacgttctagtcgttacaacctcgcatcggtgtttcgatcttcagacgttgcggacctttgatactgtacctgacatgcgagttcttggaagaatacgactctcgcgggtcatggaggaatcgacatcggtcgag

SEQ ID NO: 37745 - DNA, 260 bp, Unknown; identical to SEQ ID NO: 37743
  Description of Unknown: RightRegion for integrase A313 sequence

SEQ ID NO: 37746 - DNA, 260 bp, Unknown; identical to SEQ ID NO: 37740
  Description of Unknown: RightRegion for integrase A314 sequence

SEQ ID NO: 37747 - DNA, 260 bp, Unknown
  Description of Unknown: RightRegion for integrase A315 sequence
ccgggggcggggctaccagtgctggcctgacacgataggggcttggctcgtgggtcgcatggcgggaaaagcccgcagggctaggggggaccaagcgggccaaagggctagccgcccgtagggcgtccttgcggtcaggggagccccccgcagggggtcagtttccagggagtgtccccgtgcaaacgtacgataggcccatgcgtgtgctgggtcgagtccgtctgtcgaggttcaacgaggagtccacctcggtagaa

SEQ ID NO: 37748 - DNA, 260 bp, Unknown
  Description of Unknown: RightRegion for integrase A316 sequence
accgccacggttccggccgtcgcgacacgcacgggggatagactcagcactgcaccagctcctatctggtgtaacgcccctggtctgttcacgcaggccaggggctcttttcattagtgaagaatcccgaaaaacgggagcccgagtttcaacattcttctctccttgctactgtctctgacatgcgagttcttggaagattgcgaatctcacgagccactgaggaatctaccagcatcgagcggcagcgcgagatcgtg

SEQ ID NO: 37749 - DNA, 260 bp, Unknown
  Description of Unknown: RightRegion for integrase A317 sequence
accgccacggttccggccgtcgcgacacgcacgggggatagactcagcactgcaccagctcctatctggtgtaacgcccctggtctgttcacgcaggccaggggctcttttcggtagtgaagaatcccgaaaaacgggagcccgagtttcaacattcttctctccttgctactgtctctgacatgcgagttcttggaagattgcgaatctcacgagccactgaggaatctaccagcatcgagcggcagcgcgagatcgtg

SEQ ID NO: 37750 - DNA, 260 bp, Unknown
  Description of Unknown: RightRegion for integrase A318 sequence
accgccacggttccggctgtcgcgacacgcacgggggatagaatcgacattgcacgagctcctatctcgtgtatcgcccctggtctgttcgcgcaggccaggggctctttgacctagtgaagaatcccaaaaatcgggagcccgagtttcaacattcttctctccttgctactgtgtctgacatgcgagttcttggaagattgcgaatttcacgagccactgaggaatctaccagcatcgagcggcagcgcgagatcgtg

SEQ ID NO: 37751 - DNA, 260 bp, Unknown
  Description of Unknown: RightRegion for integrase A319 sequence
aatcgagatggggctacttgtgctggcctgacacggtgaggggctaggtccgtgggtcgcattgggacaagcccgcagggctagggggacaaagcgagggccacaggtctagccgcccgtagggcgtccttacggtcaggggagcccccgtcaggggtcagtctccaggagcggtagaagtgccaaagtacgatggacgtatgcgtgtgctcggtcgggttcgtctctctcggttccaagaagaatctacgtcggtcgaa

SEQ ID NO: 37752 - DNA, 260 bp, Unknown
  Description of Unknown: RightRegion for integrase A320 sequence
tctacttttgaaaagataacaattgataatggagaaataataaagataatatttaggtaaaatgcgacaaaaaaggcattttttaacattttttaatataatatgatataataattatgaagttattggtggtaatggcggtatcggtagtacaacatattattaaataggaggtaaaaatgaataaagatgctgaatcatctcaaaaaaacaagcaaggtgatttaaatataaagcaaaaaatgtctgaaataaatgat

SEQ ID NO: 37753 - DNA, 88 bp, Unknown
  Description of Unknown: RightRegion for integrase A321 sequence
acaagaatagaagtaagtcaagatggtgtgataaacatcgtatatagatttgaagaataatatttttatccttattgacatatgagga

SEQ ID NO: 37754 - DNA, 260 bp, Unknown
  Description of Unknown: RightRegion for integrase A322 sequence
ataagttaaccgtaaaatattcctgaggtgatgcgaatgatagtgattaaattacttgtaactgaagaagacttagacttattaaaagattttggatttattttctgggatgaacgaaaacttactcaagaagaactttataattattataagtttttactttcattacagaaggtttctaaggagggaagcgaagaatcatgaaaaaagctgctgcttatgcgagagtttcgacaaaggatcaatcaaaaatttcaatt

SEQ ID NO: 37755 - DNA, 260 bp, Unknown
  Description of Unknown: RightRegion for integrase A323 sequence
gcatcgtgttggggttgctacaaaccacccctgttgaagttcgagtaaccaatggccctcgggcggtcccatcacgggatcgcctgggggcctttttctttgaccaacatatgcacgtattcgcatacatgctttgttgaagcccgaacttgtagcacccgatgttcggacaatgtaaaacctgtgataccgtacctgacatgcgtgttcttgggagaatccgactgtccaggctcagcgacgaatctaccagtccggag

SEQ ID NO: 37756 - DNA, 260 bp, Unknown
  Description of Unknown: RightRegion for integrase A324 sequence
tcttcgtggcgatcaacaacagcgggaagacccaaacggtctaccgctgaccccgacctccgggctggccttcgggctggcccgggggtcttttttttgtgcctgacacatgcacgtattcgcatacgttgattgtagaatccccgaacttcgatcagtccatgttcggggtttgtgcaacctctgctatcgtctctgacatgcgtgttcttgggagaatcaggctgtccaggctcagcgacgaatctaccagtcccgag

SEQ ID NO: 37757 - DNA, 260 bp, Unknown
  Description of Unknown: RightRegion for integrase A325 sequence
gagccggtaagtagtgagtacggttccaaaaagaagggcgggagaaatcccgcccgatagtccaaacaatcaaggaacctcgtaaatgaaagacgtgaataacacaataggcaatcgtgcagccaatgtttgggagcgcccattgactggccccgaactgactgccaaccgcacccagcaggatattgatacatggtgggcgctgattgaccggcttttgcctgtggtgactgtcaacaaatggagcaagatcgaaaccg

SEQ ID NO: 37758 - DNA, 260 bp, Unknown
  Description of Unknown: RightRegion for integrase A326 sequence
acccgtcccctcgggctggccttcgggctggcccggggggtctttttttgtgcctgactcatgcacatattcgcatatgtcttcgtatcgaacgccgtcgtcaatctgacgctgccgttccttgtccatgccgccacgctacgcgggagtggttgaaggtccgcaagatgcgacgattcgcacctgttacagttaccaccatgcgtgtgctgggaagagtgaggttgtcgcggttttctgacgagtctacgtctgtcgag

SEQ ID NO: 37759 - DNA, 260 bp, Unknown
  Description of Unknown: RightRegion for integrase A327 sequence
tacgagtgccggtgcggtggattccacctgtctgacgctcgccgtgtcgtcgctctcggcggctagaagagggaccaggccgggtgcactcgagggggtgcatccggccaccccttttttgtctcaaattacatagtttccctacctaacatgtttgggtgccctttatctacctgcatcaatgcagtaagatggcacccatgacagcaacccttgagaccccaccacaggtcgtcgcgccgccccggctgagggctgcg

SEQ ID NO: 37760 - DNA, 260 bp, Unknown
  Description of Unknown: RightRegion for integrase A328 sequence
tacgagtgccggtgcggtggattccacctgtctgacgctcgccgtgtcgtcgctctcggcggctagaagagggaccaggccgggtgcactcgagggggtgcatccggccaccccttttttgtctcaaattacatagttttcctacctaacatgtttgggtgccctttatctacctgcatcaatgcagtaagatggcacccatgacagcaacccttgagaccccaccacaggtcgtcgcgccgccccggctgagggctgcg

SEQ ID NO: 37761 - DNA, 260 bp, Unknown; identical to SEQ ID NO: 25656
  Description of Unknown: RightRegion for integrase A329 sequence

SEQ ID NO: 37762 - DNA, 260 bp, Unknown
  Description of Unknown: RightRegion for integrase A330 sequence
tgcctcaatggttaaacttgttggtttagctgtttgctgaatcatctattttacctctttatattctacttttaacgcgggattcatgagacaacgactttaaacctatataagcactctatttaatttttgtctatcagtttgtatacagttatgtataatactatgggcaaaaataaactaatcaggctgcgttatctatggttactggattaacagattatagtgactgcgtgggttattgtcgggtttctactcaa

SEQ ID NO: 37763 - DNA, 260 bp, Unknown
  Description of Unknown: RightRegion for integrase A331 sequence
aagaaaatcacacttagtaaggataagtatatcgacatcgaatatacattttctttatagttttaaagttggttattagttactgtgatatttatcacggtacccaataaccaatgaatatttgataaattgaacatttttagtaaacaatattttctcaatatgagaattgcgctttacagaacacatgctctcattaatgtgataaaatattctgtaaatataatggaaaaagtgttgcttattgaaatgaagggggt

SEQ ID NO: 37764 - DNA, 260 bp, Unknown; identical to SEQ ID NO: 37763
  Description of Unknown: RightRegion for integrase A332 sequence

SEQ ID NO: 37765 - DNA, 260 bp, Unknown
  Description of Unknown: RightRegion for integrase A333 sequence
ggtgcggggtgtggcacgtgtctgatgctcgccgggtccgcgttctagggaaagtgagctaaccagaccgggaggtcgagtgcagtcgagggggctgcgctcgacctcccttttttatttgtctcaaattacttagtttgtctatctatgttgtttcggtgcccttcaaaaacaccgttcaacctggtaagatggcacctatgacagcgaccctcgagcgacacctcgacaccccgcagcaggaggccctgcgggtgggt

SEQ ID NO: 37766 - DNA, 260 bp, Unknown
  Description of Unknown: RightRegion for integrase A334 sequence
gctggccgatggagggcttcgggaccaccgagtgtcaactcgaggccctgaggatgatgggtcagtaaaagagagggggtcgggtgcagtcgaggggctgcatccggcccttttttatttgccaaaaattagttagttcggcttcctatattgtttcggtgcccttcaaatacaagctccaacctgctaagatggcacctatgacagcaaccctcgagcgacacctcgacaccccgcagcaggaggccctgcgggtgggt

SEQ ID NO: 37767 - DNA, 260 bp, Unknown; identical to SEQ ID NO: 24374
  Description of Unknown: RightRegion for integrase A335 sequence

SEQ ID NO: 37768 - DNA, 260 bp, Unknown
  Description of Unknown: RightRegion for integrase A336 sequence
atgaaaatatattaaaatattcctgaggtgatgcaaatgatagtaattaaattacttgtaactgaagaagacttagacttattaaaagattttggatttattttctgggatgaacgaaaacttacacaagaagaactttataattattataagtttttgctttcattgcagaaggtttctaaggagggaagcgaagaatcatgaaaaaagctactgcttatgcaagagtttcgactaccgaacaatcaaaaacaagtatc

SEQ ID NO: 37769 - DNA, 260 bp, Unknown
  Description of Unknown: RightRegion for integrase A337 sequence
cgagacggtaagaagggcggccccttcgatcccgcccgagtagagccagtcttcgcgtaaacgcaacaaggcccctccccccgaggcgtcagcatcgctgatgccgactagggagaggggctcaatcatgtcttacttcagcttcatcaactcaaggatctcgtccgcagtttcctcatcaagttcaggagcctcggagagccacttctcaagccactcctcttggctcactcatcctccagctcagtcagaggacccca

SEQ ID NO: 37770 - DNA, 260 bp, Unknown
  Description of Unknown: RightRegion for integrase A338 sequence
aagaaaatcacacttagtaaagataagtatatcgatatcgaatatacattttctttatagttttaaagttggttattaggtactgtgacatttattacggtaaccaataaccaacgaatttctgagaagttgaacatttttagtaaacaatattttctcaatatgagaatcgtgctttgcagaacacatgctctcattaatgtgataaaatattctgtaaatataatggaaaaagtgttgcttattgaaatgaagggggt

SEQ ID NO: 37771 - DNA, 260 bp, Unknown
  Description of Unknown: RightRegion for integrase A339 sequence
aagcagcctacaacaaggtttaccataaaactacatttggtctatctgacgttttaaaattgtttaaataaaacaaaaaagcccacgctcaaattttggacgaggagagcgtgagctaaataattggtagtatagtaaaagcctgcttttagtagggctatttactatacccattttaacaagaaatgaggtataaatcaatgcaaacaaagaaagtagcaatctatgtccgtgtgtcatcattacaccaagctatcgaa

SEQ ID NO: 37772 - DNA, 260 bp, Unknown
  Description of Unknown: RightRegion for integrase A340 sequence
tttcttaacagttatcttagctcttgtcggtcttattacttagtttgtcccatatattacaaatttaatcaaaaaaataaaaaagtccatatgctcacttagtttggcgactcagagcataggactattagaatagtaataaacctgcattgtaggttcttttactattctcattttaacaaaaaatgaggagtaaaacaatgaataaagttgctatctatgtgcgcgtaagcacaacaatgcaagctgaagaagggtac

SEQ ID NO: 37773 - DNA, 260 bp, Unknown
  Description of Unknown: RightRegion for integrase A341 sequence
aagagaaatttaatgttatgacatctagagaagacggtataattgaattagatttagaatttgatgaagacaaataaaaaaagccccacgctcaaattttggccaaggagagcgtgaggcaaattctagtatagtaaaaacctgctttttgggaggggcttttaccatacccattttaacagaaaaatgaggtgaaaacaatgaataaagttgctatctatgtgcgtgtgagtacaactatgcaagcagaagaggggtac

SEQ ID NO: 37774 - DNA, 260 bp, Unknown
  Description of Unknown: RightRegion for integrase A342 sequence
cccataacgttaaagcggctgtatcttgcagtcgcttgtttttttgtaaaagaaaaaagcctcatactctccacgaccaaattttgagtataagacttaacttgttgaaataaaccaaaaccactaaattattcattagggtataggtctttttctataccctattttatcataaaacctacaaaatagggagaagaacaatgaataaagttgctatctatgtgcgtgtgagtaccactatgcaagcagaagaagggtac

SEQ ID NO: 37775 - DNA, 260 bp, Unknown
  Description of Unknown: RightRegion for integrase A343 sequence
gaaagcagcttataacaaggtttatcataagactacatttggtctatctgacattttaaaattgtttaaataaacaaaaaagcctcacgctctgagtcgccaaactagagagcatgaagcgaataagtatgtataagaaaacagccattaaatgggcctttttcttatacccattttaacaagaaatgaggtataaatcaatgcaaccaaagaaagtagcaatctatgtccgtgtgtcatcattacaccaagctatcgaa

SEQ ID NO: 37776 - DNA, 260 bp, Unknown
  Description of Unknown: RightRegion for integrase A344 sequence
actatggagaggatatgtggattgacgtttttcttaaacggattaactttgctataaagtatacaaaataaaaaagccttacgctccccagacggcaatcttggagcataaggctacactacaagaaatcaggcattaaaaagccctttttcttgtacctattttaccattttttaggaaattttgaaagaggtactactatgatgacaacaaataaagtggcaatctatgtcagagtatcgactactaaccaggctgag

SEQ ID NO: 37777 - DNA, 260 bp, Unknown
  Description of Unknown: RightRegion for integrase A345 sequence
aagcaaactacgcaattcaacacttgaatgattaacacatgcccttatgggcgtacataatagacaatgaagtctttaaaataagacaaataaaaaagcacaccatatccgaccaaagacataggtgtgcttgaattttcaaacgcatggagcgttctatttaattatatcagagcgcccctttttaaggaggcttttttatgaacaaaaaagtggcactatatgttcgcgtgtctactttagaacaagcggaaagtggc

SEQ ID NO: 37778 - DNA, 260 bp, Unknown
  Description of Unknown: RightRegion for integrase A346 sequence
acgaagacggcggaggatttacaaaatcagaagttaagtatgctatgaaacatttagaggacgaagattaaaaaaagctcacgctctcaaagtttggcgactcagagcgtgagcgaggaagtataagaaagtaagcattaaaaagctgtctttcttgtacctattttatcattttttaataaattttgaaagagggtacaatgatgaacacaatcaacaaggttgctatttacgtacgtgtatcaacaaacgtgcaggca

SEQ ID NO: 37779 - DNA, 60 bp, Unknown; identical to SEQ ID NO: 24789
  Description of Unknown: RightRegion for integrase A347 sequence

SEQ ID NO: 37780 - DNA, 60 bp, Unknown; identical to SEQ ID NO: 24789
  Description of Unknown: RightRegion for integrase A348 sequence

SEQ ID NO: 37781 - DNA, 60 bp, Unknown
  Description of Unknown: RightRegion for integrase A349 sequence
gggcttataaacaaggttcaggtaacagctgaggacattgttatcaagtggaaaatataa

SEQ ID NO: 37782 - DNA, 153 bp, Unknown
  Description of Unknown: RightRegion for integrase A350 sequence
aggcttataaacaaggttaaggtgacagctgaggacattgttatcaattggaaaatataaataattttagtaacctacatttcaatcaaggatagtaaaactctcactcttttctatctcatacatccttaccgaatgcaacacgagatcacg

SEQ ID NO: 37783 - DNA, 76 bp, Unknown
  Description of Unknown: RightRegion for integrase A351 sequence
aggcttataaacaaggttaaggtgacagctgaggacattgttatcaattggaaaatataaataattttagtaacct

SEQ ID NO: 37784 - DNA, 153 bp, Unknown
  Description of Unknown: RightRegion for integrase A352 sequence
gggcttataaacaaggttcaggtaacagctgaggacattgttatcaattggaaaatataaataattttagtaacctacatttcaatcaaggatagtaaaactctcactcttttctatctcatacatccttaccgaatgcaacacgagatcacg

SEQ ID NO: 37785 - DNA, 260 bp, Unknown
  Description of Unknown: RightRegion for integrase A353 sequence
cccggcccggggtttgacccgtcgagtgtgcggttcgtgtggggccgatctgcagattgacgctcggcatgcaccgatgcgcacgcgtcggcgggtgttttagggtgcccgcacggcggtgcgtcgaagtgtgcatcgcagcacaattgaatacatacaacagaatagagcccggcaaatgcgcacgatcagcgttgaagagtacgccgaacaggtcgccgcggcggcaccgccgttgacggacgcgcagcgtggacggc

SEQ ID NO: 37786 - DNA, 260 bp, Unknown
  Description of Unknown: RightRegion for integrase A354 sequence
cgcggtccggggttcgacccgtcgagtgtgcggttcgtgtggggccgatctgcagattgacgctcggcatgcaccgacgcgcacgcgtcggtgcgtgttttagggtgccgcacggcggtgcgtcgaagtgtgcaccgcagcacaattgaatacatacaacagaatagagcctgacaaatgcgcacgatcagcgttgaagagtacgccgaacaggtcgccgcggcggcaccgccattgacggacgcgcagcgtggacggct

SEQ ID NO: 37787 - DNA, 260 bp, Unknown; identical to SEQ ID NO: 37763
  Description of Unknown: RightRegion for integrase A355 sequence

SEQ ID NO: 37788 - DNA, 260 bp, Unknown
  Description of Unknown: RightRegion for integrase A356 sequence
cggctacgctaccacagttcgcaaagcctcaaaatcgggaactcgatattcatgctttgtgaaagtgctgtcttcatgcggaactgtaacacgttctagttgttacagcctcacatcggtgactcgatcttaagacgttgcgaacctctgatactgtacctgacatgcgagttcttggaagaatacgactctcgcgggtcatggaggagtcgacatcggtcgaacgacagcgagagatcatcgagacctgggcgcgtcag

SEQ ID NO: 37789 - DNA, 260 bp, Unknown
  Description of Unknown: RightRegion for integrase A357 sequence
agagtaaatgacctgaaagaaaaattgatcatcttacaagacagagtagatgataatatataacaaacaaaaaagccccacgctctcaaactttggcgagtctgagcgtgaggctatgagcaagaaaggattttcatggagataacctcgcatgatgtcttttcttgtacctattttatcaaaaaaggggtacaaattcaatgaaaacaatgaataaagtggctatatatgtcagagtatctactacctcacaggttgag

SEQ ID NO: 37790 - DNA, 260 bp, Unknown; identical to SEQ ID NO: 24779
  Description of Unknown: RightRegion for integrase A358 sequence

SEQ ID NO: 37791 - DNA, 260 bp, Unknown
  Description of Unknown: RightRegion for integrase A359 sequence
agagtaaatgacctgaaagaaaaattgatcatcttacaagacagagtagatgataatatataacaaacaaaaaagccccacgctctcaaactttggcgagtctgagcgtgaggctatgagcaagaaaggattttcatggagataacctcgcatgatgtcttttcttgtacctattttatcaaaaaaggggtacaaattcaatgaaaacaatgaataaagtggctatatatgtcagggtatcgacgacaaaccaggttgag

SEQ ID NO: 37792 - DNA, 260 bp, Unknown
  Description of Unknown: RightRegion for integrase A360 sequence
aagaaaatcacacttagtaagaataagtatatcgacatcgaatatacattttctttatagttttaaagttggttattagttaccgtgatatttatcacggtacccaataaccaatgaatatttgataaattgaacatttttagtaaacaatattttctcaatatgagaattgcgctttacagaacacatgctctcattaatgtgataaaatattctgtaaatataatggaaaaagtgttgcttattgaaatgaagggggt

SEQ ID NO: 37793 - DNA, 260 bp, Unknown
  Description of Unknown: RightRegion for integrase A361 sequence
cggctacgctaccacagttcgcaaagcctcaaaatcgggaactcgatattcatgctttgtgaaagtgctgtcctcatgcggaactgtaacacgttctagtcgttacaacctcgcatcggtgtttcgatcttcagacgttgcggacctttgatactgtacctgacatgcgagttcttggaagaatacgactctcgcgggtcatggaggaatcgacatcggtcgagaggcagcgagagatcatcgagacctgggcgcgtcag

SEQ ID NO: 37794 - DNA, 76 bp, Unknown
  Description of Unknown: RightRegion for integrase A362 sequence
gggcttataaacaaggttcaggtaacagctgaggacattgttatcaattggaaaatataaataattttagtaacct

SEQ ID NO: 37795 - DNA, 76 bp, Unknown; identical to SEQ ID NO: 37794
  Description of Unknown: RightRegion for integrase A363 sequence

SEQ ID NO: 37796 - DNA, 76 bp, Unknown; identical to SEQ ID NO: 37783
  Description of Unknown: RightRegion for integrase A364 sequence

SEQ ID NO: 37797 - DNA, 260 bp, Unknown
  Description of Unknown: RightRegion for integrase A365 sequence
cgtggcccggggttcgacccgtcgagtgtgcggttcgtgtggggccgatctgcagattgacgctcggcatgcaccgacgcgcgcgcgtcggtgcgtgttttagggtgccgcacggcggtgcgtcgaagtgtgcaccgcagcacaattgaatacatacaacagaatagagccaggcaaatgcgcacgatcagcgttgaagagtacgccgaacaggtcgtcgcggcggcaccgccgttgacggacgcgcagcgcggacggtt

SEQ ID NO: 37798 - DNA, 260 bp, Unknown
  Description of Unknown: RightRegion for integrase A366 sequence
tacacatcaaaacagatgatggaaactcacttgtttcacaaaagatgagcggtgagatgagagtgaaagttaaataaaacaaaaaagccccacgctcaaattttggtcgatgagagcgtgaggcgaatctagtacaagaaaaaagcattaaatggcttgttttcttgtacctattttatcaaaaaaggggtacaaaaacaatgattacaacaaataaggtagctatctatgtcagagtatcgacgactaaccaagctgag

SEQ ID NO: 37799 - DNA, 260 bp, Unknown
  Description of Unknown: RightRegion for integrase A367 sequence
atggaaattcacttgcatctcaaaaaatgaacggcgagatggaagttaaataaaataaaaataaataaaaaatcctcatgttcaaagtttggcgacggtgaacacgaggaaaggaagtatacaagaaaatagccattaaacgggcaattttcttgtacctattttatcattttttaacgaattttgaaagagggtacaatatgaatgcaatcaataaagttgctatttacgtacgtgtatcaacaaacgtgcaggcagaa

SEQ ID NO: 37800 - DNA, 260 bp, Unknown
  Description of Unknown: RightRegion for integrase A368 sequence
gttgcaaattatgccaacgagattttagaagtaatcaagaaattctcataaaacaaaaaagccccacgctctcaaactttggcgagtctgagcgtgaggctagtacttacaagaaaaacttttcaaaagagattgccttttgagatgttttcttgtacccattttatcattttttaggaaattttgaaagaggtactactatgataacaacaaataaagtagctatatatgttagggtgtctaccacatctcaggcagaa

SEQ ID NO: 37801 - DNA, 260 bp, Unknown
  Description of Unknown: RightRegion for integrase A369 sequence
tacacatcaaaacagaggatggaaactcacttgtttcacaaaagatgagcggtgagatgagagtgaaagttaaataaaacaaaaaagccccacgctcaaattttggtcgatgagagcgtgaggcgaatctagtacaagaaaaaagcattaaatggcttgttttcttgtacctattttatcaaaaaaggggtacaaaaacaatgattacaacaaataaggtagctatctatgtcagagtatcgacgactaaccaagctgag

SEQ ID NO: 37802 - DNA, 260 bp, Unknown
  Description of Unknown: RightRegion for integrase A370 sequence
ttaaagcgagtgtataaatccggggatactattattctacaaagcgaaaacccggcgtacaagcctatcatcctgcataaagacgatatgaaaaatgtaaggatcataggcaaactgaaaaaagtagtcctaaatttctagcgctagaaatttagacgggcgggcgacggctcgcccatcttttttaggagggaacaggtatgcgaaccgcattgtatatccgcgtgagcacggaagaccaagcgcgggaggggtattcc

SEQ ID NO: 37803 - DNA, 260 bp, Unknown
  Description of Unknown: RightRegion for integrase A371 sequence
aagaaaatcacacttagtaaggataagtatatcgacatcgaatatacattttctttatagttttaaagttggttattagttactgtgacatttgttacggtaaccaataaccaacgcacatacaaatcgaagctccgggaaattggatgtttttaataaacaaaactttctcaacacgagaatcttggatgtagaacacatgctctgattaatatggtaaaatattctgtaaatataatgggagctatggcgcttatcga

SEQ ID NO: 37804 - DNA, 260 bp, Unknown
  Description of Unknown: RightRegion for integrase A372 sequence
gccttgataagcaaggttcgagttactagtgaaactatcgttattttatggaaattatagagcgttttagtgacattcatttcaatcaaggatactaaaattcttgattcgagcataaaaaagactcattaatgcttagccttttttgaaatggtataataaaacaaaaaggagaaatcgagatggatgtttgtaaacacacaatagagatttatgatgacaaaaccaaagatatagaaacattgctttttgccaaagtg

SEQ ID NO: 37805 - skipped

SEQ ID NO: 37806 - DNA, 260 bp, Unknown
  Description of Unknown: RightRegion for integrase A374 sequence
aaaagaaagattacttgaatatagagataaatttgaagatgacactataaaattaatagatattttatacaatagctaaaaaaagccccacgctccaaccgaccaaagcgaagcacgaggcaaatctagtatagtaaaaacctaatttgttaggtctttttactatacccattttaacatagaaatgaggtataaatcaaatggctaaagtagcaatttacacaagagtaagcacgactttgcaggcagacgaaggttat

SEQ ID NO: 37807 - DNA, 260 bp, Unknown
  Description of Unknown: RightRegion for integrase A375 sequence
aagataccatctaacaaagtactagaaagggcaaaaatacttgaaatagagtttaattaacttttttactgtctattatacaaacaggcagtactgttagaataatgggcacgaaatctcttctcatctgatttaactcccctcaaacgaggggatttttttatgcaaaaaaaattttaaaaagctattgactgatacgaattcgtatcatataataaaatcagaaagtgatacgaattcgtatcaaaagttataaaagg

SEQ ID NO: 37808 - DNA, 260 bp, Unknown
  Description of Unknown: RightRegion for integrase A376 sequence
taccgccctctgcctgttaccgcaggtagggggctctttttctgttgacggtcggttacgctaccacagttgtcaaagcctaaagatggggaactcgatattcatgctttgcgaaagcgctgttctcacggctacactcctctgacatgcgggttcttgggagaatacgactctccagaatgatggaggagtctaccagtgtggaacgccaacgtgagttcatcgagacgtgggcgcggcagaacgatcacgaaatcgtc

SEQ ID NO: 37809 - DNA, 260 bp, Unknown
  Description of Unknown: RightRegion for integrase A377 sequence
acgtgtttttcaaaccaagaaataataaataaatacaaaaaaggcccatgctctcctcgaccaaaatttgagcatggaacctaaaccaatttgaaaaataacctaccgactatttggaatgacacaaaatccaaacagggtataggcctttttcctataccctattttatcataaaacctacaaaatagggaggaaaataatgaataaagtggcaatatatgtccgagttagtacaaaaggacaagcagatgaaggatat

SEQ ID NO: 37810 - DNA, 260 bp, Unknown; identical to SEQ ID NO: 23769
  Description of Unknown: RightRegion for integrase A378 sequence

SEQ ID NO: 37811 - DNA, 260 bp, Unknown
  Description of Unknown: RightRegion for integrase A379 sequence
atgaggatcaggtattgatattcagtcccgagtctacaatcactaagtttagggatgtagtaattccgtttgatacccaaaacgaattaaagatacatggcaaggtagtattatattcagttacattagattaaacgttaacgttaatatttaatcataggcgggccgatcacccgccttcttttataggagttgaagtaatgaaaacagctgtatacattcgggtatcgacagatgaacaagtaaacgaagggtattca

SEQ ID NO: 37812 - DNA, 260 bp, Unknown; identical to SEQ ID NO: 24381
  Description of Unknown: RightRegion for integrase A380 sequence

SEQ ID NO: 37813 - DNA, 260 bp, Unknown
  Description of Unknown: RightRegion for integrase A381 sequence
ggaggttttacaaaatcagaagtcaactacgctattaaacatttagaagacgaagattaaaataaacaaaaaagcccacgctctcaaagtttggcgactcagaacgtgagctaggaagtatacaagaaaaagccattaaatgggcgtttttcttgtacccattttatcatttttcaacgataattgaaagaggtacaaatatgaacaaagtagctatctatgtacgtgtatcaactactaaccaagccgaggaaggctat

SEQ ID NO: 37814 - DNA, 260 bp, Unknown
  Description of Unknown: RightRegion for integrase A382 sequence
ggttattgtttcgtttggttctgcaattatcggcgcaattgttagttatgtcataattaaatattttaaatagaaaataaaaaaatccacatgctcaactttggtcggtgcgagcatgcggatgaattagaatagtaaagaacctgcgtttgtaggctgttttactattcccattttaacatgaaatgaggagtaaaacaatgaacaaagtagcaatttatgttagagtttccacaactaaccaagcagatgagggatat

SEQ ID NO: 37815 - DNA, 260 bp, Unknown
  Description of Unknown: RightRegion for integrase A383 sequence
tatgataatatccaactcgcagaaaacatgagaacaattggtgaggttgtggatatctatagagaaaattaaaaaagccccacgctcagaagtttggcgaccgagagcgtgaggcaagctacaagaaagatttttcaaaagatagtgtcttttgaactcttttcttgtacccattttatcagaaaagaggtacaaatacaatgaaaacaacgaataaagtggcaatctatgttagggtctccactacctcgcaagctgaa

SEQ ID NO: 37816 - DNA, 260 bp, Unknown
  Description of Unknown: RightRegion for integrase A384 sequence
cgatcaccagggggaccatccatgcgtgggccaccccgttgtcggccgccagctcactgagcgcagtgaaggacagtgagaatgccagggccccaacggcaatcgtgcctgacgtggcgatacggaccgcgttgatcttcatcatgtctacagaccctatacggcgacaactccttgtcaagttgttgtagactcgtgtcgtggcaggtcaacgagttctggggcgtattcgcctctcgcgtctcaccgaagagtcgacc

SEQ ID NO: 37817 - DNA, 260 bp, Unknown
  Description of Unknown: RightRegion for integrase A385 sequence
gacccgtctctcatcgagatccgtaggcgcttcccagaagaggccccgaatggcctctagctcgcgggggccgagggtgccgaactcgctgacaaccttctcggcgtattcatcgagagatattgccatgtgtgaaagtttgccaggttccggtggtaacgtgtggcaaaccctgtagcatggctaagcatttgggcataagaaaaggggcacagccgatttggctggccccttctcttttgggtgggtggctaccggtt

SEQ ID NO: 37818 - DNA, 260 bp, Unknown
  Description of Unknown: RightRegion for integrase A386 sequence
ttgtctctcaaaagatgaacggagagatgaaagtcaaagtaaaataagaacaaaacaaaaaagccccacgctctctaagtttggcgactcagagcgtgaggctagtgacaagaaaaactttttcagaagatagtatcttttgagaggttttcttgtaccaattttatcatttttttggaaattttgaaagaggtactaccatgatgaacagaaataaagttgctatctatgtacgtgttagcacacaggggcaagttgat

SEQ ID NO: 37819 - DNA, 260 bp, Unknown
  Description of Unknown: RightRegion for integrase A387 sequence
tggaataaaaaagaacagctttattggggcactgcttccattgtatttttagtgctttttataatctaaacacaataataaaaagcctcacgctcaactttggtcgatgcgagcgtgaggcgaacgtgtatagtaaaaacctgctttgcagtaggtctctttactatacccattttaacataaaaatgaggtgaaaaacaatgattacaacaagaaaagtcgctatttatgttagagtcagtacaacaaatcaggcagag

SEQ ID NO: 37820 - DNA, 260 bp, Unknown
  Description of Unknown: RightRegion for integrase A388 sequence
atgtcctccatgactgctgatgaccacgtcaccatcgagtggcgggacgtgagcgagtagcggatacgacgaagccccggctaccccctttcgggggtgccggggccttgtctcagttgtggtggccgcactccatccgctcgatgacggcgagggcgtcctcgtacctgcttgcctcctgcatcaggaggaggcgaaggtcggcgagcttggcctgtacccacttggggagtcgggcctccctctccgagctcatcagc

SEQ ID NO: 37821 - DNA, 260 bp, Unknown
  Description of Unknown: RightRegion for integrase A389 sequence
ggcgtgcaggaggtgttccacccgggctgatcagatgatccatcgggaacctactcgtttgaggagttccatgcaggtgccctcgggcccgcctccgggcgggctcgggggtgcttttttttgtgcctgacatatgcacatattcgcatatgtcttcgtatcggaccccgtgtcaaatgcggcgactatgacaactcacggtgtaccctttcgacatgcgagtcctaggccgaatccggctctcccgaatcaccgaagaa

SEQ ID NO: 37822 - DNA, 260 bp, Unknown
  Description of Unknown: RightRegion for integrase A390 sequence
ctgacctccatgtctgtcgatgatcacgtcaccatcgagtggcgggacgtgagcgagtaaccgctacccccgaacgggggtaggtacgacgaagccccggctacccccattcgggggtgccggggccttgcgttgcacgtcagttgtggtggccgctctccaggcggtcgatctcttcgagagacgcctcgtagttgccggcctcctggaggaggagcaggcggaggtcggcgaacttggcctgcgcccaggcggggagc

SEQ ID NO: 37823 - DNA, 260 bp, Unknown
  Description of Unknown: RightRegion for integrase A391 sequence
ctgaccagcatgaccacggacgaccacgtcagcatcgaatggcgtgacgtcgaggagtaagcaggtacgacagagccccggctaccccctttcgggggtgccggggccttgtcttgtctcactccccccgaacgggggtggtgtcagttgtggtggccgctctccatctgctcgatgacttcgagggcgtcctcgtacttgctcgcctcctgcatcaggaggaggcggaggtcggcgagcttggcctgtgcccacttcgg

SEQ ID NO: 37824 - DNA, 260 bp, Unknown
  Description of Unknown: RightRegion for integrase A392 sequence
aggcaaatacctttgcggttgagctccttcttcccgattgggtagtaagccaatataaaaatactgaattcacccttgatgatatagctgtcatgaatggggttcctgcagagttagcccacctaaaagacctatcagagctaaaaaatttttagcccgaaaacagaacatatgtttccaaaaagggaggatagattatcatgaacttgatggatgaaaacactccaaagaatgtcgggatatacgttagggtttcaaca

SEQ ID NO: 37825 - DNA, 260 bp, Unknown
  Description of Unknown: RightRegion for integrase A393 sequence
cgtaaatggttatgatgcaactttaaaaagagtatttaaacatcaggatggtgtaactctagaacctcttagttacaatcctgaccaccaaacacaattttatagtgataaagacatggaccattaccctgtatcaattaaaggtaaattagtctggtatatggcaccacttaatattaaattctaggaggattttacctatgaagtgtgtagcctatattagggtatctacagatgaacaagctaaacatggttattcc

SEQ ID NO: 37826 - DNA, 260 bp, Unknown
  Description of Unknown: RightRegion for integrase A394 sequence
atgacctccatgtctgtcgatgatcacgtcacgatcgagtggcgggacgtcgaggagtagcaggtacgacgaagccccggctacccccattcgggggtgccggggccttgtcttgtctcgctacccccgaacgggggtggtgtcagttgtggtggccgctctccaggcggtcgatctcgttcagggcgtcctcgcaccggccggcctcctgcatcaggaggaggcggaggtcggcgagcttggcccgtgcccacttcggg

SEQ ID NO: 37827 - DNA, 260 bp, Unknown
  Description of Unknown: RightRegion for integrase A395 sequence
ctgaccagcatgaccgtggacgaccacgtcacgatcgaatggcgtgacgtcgaggagtaagcgggtacgacgaagccccggctacccccattcgggggtgccggggccttgtcttgtcttgctacccccgaacgggggtggtgtcagttgtggtggccgctctccaggcgctcgacctgcttcagtgcgtcctcgtaccgggccgcctcctgcatcaggagcaggcggaagtcgccgagcttgtcctgtgcccaccgagg

SEQ ID NO: 37828 - DNA, 260 bp, Unknown
  Description of Unknown: RightRegion for integrase A396 sequence
ctgacctccatgtctgtcgatgatcacgtcacgatcgagtggcgggacgtgagcgagtaaccgctacccccgaacgggggtaggtacgacgaagccccggctacccccattcgggggtaccggggccttgcgttgcacgtcagttgtggtggccgctctccaggcggtcgatctcttcgagagacgcctcgtagttgccggcctcctggaggaggagcaggcggaggtcggcgaacttgatctgggcccagacggggagc

SEQ ID NO: 37829 - DNA, 260 bp, Unknown; identical to SEQ ID NO: 37390
  Description of Unknown: RightRegion for integrase A397 sequence

SEQ ID NO: 37830 - DNA, 260 bp, Unknown
  Description of Unknown: RightRegion for integrase A398 sequence
accataagcactgctagcggtggtagttctggttttggtggtggtgaccgtatccaagcgactatggtatttgagaaaatttaaaaaagccccacgctcagaagtttgcagacagagagcgtgaggctagtggtaagaaaaaaagcattaaaaagctctttttcttatacccattttatcaagaaatgaggtaaaaatcaatgcgaaataaagtagcaatctacgtcagggtttcaaccgcttcacaagctgatgaaggt

SEQ ID NO: 37831 - DNA, 260 bp, Unknown
  Description of Unknown: RightRegion for integrase A399 sequence
cactggaacgacgaccgcgtcgagctcgtcgactacatggccgggcagctcgacgactagctcctcccccgtaccccctcctgggacgccggggatgccgctgcctacgtcgcaccccctagctatccatagaagaagaccgcctccgcccgtctagcgccggtgaggtgaccataacgaaacaacaacgaacgtcttacgggtgacgtagaatcgagacaacttcgctcacgagtgacgatatgacggttattccgtca

SEQ ID NO: 37832 - DNA, 260 bp, Unknown
  Description of Unknown: RightRegion for integrase A400 sequence
gcccgcaaggtggtgacccccgaggctgagcgagtagtcctggccgaccgagccgcctgacaacgcaagaagcccccgtcctcgaaggttgaggcgggggcttctgtcatgcagcgatcttgacggggccgagcagcgtcttcacggctcggagctggtcgtcggtcagaggtaacggcggcgagagcttgcggcgctcagccacgatggctcgggcctcctcgcgggtcacggggcgacccgtccgttcgcctggaacg

SEQ ID NO: 37833 - DNA, 260 bp, Unknown
  Description of Unknown: RightRegion for integrase A401 sequence
ctgtcgagcatgaccgtggacgaccacgtcaccatcgagtggcgagacgtggccgagtgacgaccacccccgaatgggggtaggtacgacaaagccccggctacccccattcgggggtaccggggccttcgtgtgtcagttgtggtggccgctctccaggcggtcaatctcttcgaggctcgcctcgtagttgccggcctcctggaggaggagcaggcgaagatcggcgagcttgacctgcgcccacacggggagtttct

SEQ ID NO: 37834 - DNA, 260 bp, Unknown; identical to SEQ ID NO: 37393
  Description of Unknown: RightRegion for integrase A402 sequence

SEQ ID NO: 37835 - DNA, 260 bp, Unknown
  Description of Unknown: RightRegion for integrase A403 sequence
cgcgcgccccagcgcgggaagtggtcgccggagcgcgtccgcgtcgccttccacggctgacggagcgccggaggagcgccggaggcgccgtgtaaacgccctccaagtgagcgaatagtgaagaaagtgagctaagttccttcccttgtattccattgcataggagagactctcttacagctagaacacaagggaaggaacttgcttcacttccttcactaaaactcactttcgcccttcgtgagcaacctcccccaccg

SEQ ID NO: 37836 - DNA, 260 bp, Unknown
  Description of Unknown: RightRegion for integrase A404 sequence
gtaaaggaatagagtatattttctactctaatggattaacagtcccagaaaatacaataaatataaaaaaagcaaattaaaaaagacctacacagcgccggcaagcaaacgtgtaggtcaagttggcaatagtaaaaaccttacttttcgtaggtctttttactattgccattttaacataaaagcgaggtataaatcaaatggcaaaagtagctatatacgctagagtatcaacgttaaaccaagcagatgaaggatac

SEQ ID NO: 37837 - DNA, 260 bp, Unknown
  Description of Unknown: RightRegion for integrase A405 sequence
gaggacaaggctagaatagcaatggttcttgagcagcacctcaagaataaaaagaaataaaaaagccctacgctctcaaagtttggcgactccgagcgtagagcgataatacaagaaagattttcaaaagatactatttttgaactcttttcttgtacctattttatcatttttttataaattttgaaagaggtactactatgattgcaacgaataaagtagctatttacgtgcgggtttcaaccatttctcaggcggaa

SEQ ID NO: 37838 - DNA, 260 bp, Unknown
  Description of Unknown: RightRegion for integrase A406 sequence
ggatggcggaggttttacaaaatcagaagccaactacgctattaaacatttagaagacgaagattaaaataaacaaaaaagcccacgctcaaattttggacgaggagagcgtgagctaataattggtagtatagtaaaaagcctacttttagtagggctctttactatacccattttaacaagaaatgaggtataaatcaatgcaaacaaaacgaaaagtagctatatacagtcgtgtttctacactacaccaagccgag

SEQ ID NO: 37839 - DNA, 260 bp, Unknown
  Description of Unknown: RightRegion for integrase A407 sequence
aggttttacaaaatcagaagccaactacgctattaaacatttagaagacgaagattaaaataaacaaaaaagcccacgctcaaattttggacgaggagagcgtgagctaatatgtatgtataagaaaaacaggcattaaaaagccctttttcttgtactcattttaacatttttttacaaaatttgaaagagggtacaatatgaacacaaaacgaaaagtagctatatatagtcgtgtttctacactacaccaagccgag

SEQ ID NO: 37840 - DNA, 260 bp, Unknown
  Description of Unknown: RightRegion for integrase A408 sequence
cgcagcaatcaaagcaattccaccttttcttatgtactttatcgagaacacttgtatatacagaatgaatgttctgaatttataactttaattatataataaatcattctcagaaaattgctagtactttcgacatattacgacaaaacttttataaaaaacatttagatttaatatatctttaattggagaggtttaaaatgaaagttgttctttacgtaagggttagtacgcaagaacaagttgaagaaggatatagc

SEQ ID NO: 37841 - DNA, 260 bp, Unknown
  Description of Unknown: RightRegion for integrase A409 sequence
cggtgggagctgggcgtcgaggtgtacccgctgcgcatggccccgcacgctgatgcgtaacacgcgctagcgtgtgcgccacaactgaatatcgacaactgaatatggggttccgctatgacagggcagcagctcgacgcgtgggttgcgcagcaggtggcgcgtttcaagccaggtgacttggacgccggcattgaggtgatgaagcgtgctgcgcgccggcaaggtggcaccgaagagaagcaacccgccgcgtagcg

SEQ ID NO: 37842 - DNA, 260 bp, Unknown
  Description of Unknown: RightRegion for integrase A410 sequence
ggaacagttatgggatttttaggagaaaaagggaagaagcaatggcactgcaacaagtgcagctgtatatttgagacaaaataaaaaagccccacgctcaaatttggcgaggagagcgtgaggcgaatctagtataagaaacaaccattaaataggtcgttttcttatacccattttaacaaaaaatgaggtgaaaaacaatgaggaaagtagctatttactctagagtatcaacaataaatcaagccgaagaaggatat

SEQ ID NO: 37843 - DNA, 260 bp, Unknown
  Description of Unknown: RightRegion for integrase A411 sequence
atacaacaaataggttgcattatcatgcttattcctatagtgtacattttgttccagcttatttcggcgtttaactaaaaaaaccccacgctctcaaagtttggcgactctgagcgtgaggcgaatctagtatagtaaaaacctgctttaagtaggtctctttactgtactcattttaacaaaaaatgaggtaaaaaacaatgagaaaagtagctatttactctagagtatcaacaataaatcaagccgaagaaggatat

SEQ ID NO: 37844 - DNA, 260 bp, Unknown
  Description of Unknown: RightRegion for integrase A412 sequence
ggaacagttatgggatttttaggagaaaaagggaaaaagcaatggcactgcaacaagtgcagctgtatatttgagacaaaataaaaaagccccacgctcaaatttggcgaggagagcgtgaggcgaatctagtataagaaacaagcattaaatggctcgttttcttgtacccattttaacaaaaaatgaggtgaaaaacaatgaggaaagtagctatttactctagagtatcaacaataaatcaagccgaagaaggatat

SEQ ID NO: 37845 - DNA, 260 bp, Unknown
  Description of Unknown: RightRegion for integrase A413 sequence
cagttatgggatttttaggagaaaaagggaagaagcaatggcactgtaacgagtgcagctgtatatttgagacaaaataaaaaaagccccccgctcaactttggtcggtgcgagcgtgaggcgaatctagtatagtaaaaacctgctttaagtaggtctctttactgtactcattttaacaaaaaatgaggtaaaaaacaatgagaaaagtagctatttactctagagtatcaacaataaatcaagccgaagaaggatat

SEQ ID NO: 37846 - DNA, 260 bp, Unknown
  Description of Unknown: RightRegion for integrase A414 sequence
gcgtcgagcatgaccgtggacgaccacgtcaccatcgagtggcgagacgtggccgagtagcagatacgacgaagccccggctacccccttctgagggtgccggggctttcgtgtgtcagttgtggtggccgctctccaggcggtcgatctcttcgagggacgcctcgtagttgccggcctcttggaggaggagcaggcggaggtcggcgagcttgacctgcgcccacacggggagcttcttctcgcgctcactgctgaag

SEQ ID NO: 37847 - DNA, 260 bp, Unknown
  Description of Unknown: RightRegion for integrase A415 sequence
cccgaggactgccaggtcgagtgggtggacgagcgtccgcgcctgtcggctgtgtcctgaacgcagagaagccccctacctgcgagaggtagggggctgtctcatgccgcgcgtcgggagggggctgcctcggcgatgccgaggagctgtcggaggtggacgacctgctcgtccgagagtgggggcggagggttctggcgtagctcctcgcgggctacctgccgaagctcctctcgggtcacggcgctacccgcccggcc

SEQ ID NO: 37848 - DNA, 260 bp, Unknown
  Description of Unknown: RightRegion for integrase A416 sequence
tcgaaggcgcgcaaggtcgtgaccccagagcatgagcgcgtggtcctggcagaccgctgacacaacgcaagaagccccctacctcggagtcgtgaggtagggggcttcgtcatgcagcgagacggacgggcttgcgtcggagctggaccggaccgagtagcaccttgacggtgcggagctggtcgtcggtcaggggtaacggtggggtgagctgtcgccgactggcgacgatggctcgggcctgctctcgggtcacgggg

SEQ ID NO: 37849 - DNA, 260 bp, Unknown
  Description of Unknown: RightRegion for integrase A417 sequence
tcgaaggcgcgcaaggtcgtgactccggagcatgagcgcgtgatcctggcagaccgctgacacaacgcaagaagccccctacctcggagtcgtgaggtagggggcttcgtcatgcagcgagacggacgggcttgcgtcggagctggaccggaccgagtagcaccttgacggtgcggagctggtcgccggtcaggggtaacggtggggtgagctgtcgccgactggcgacgatggctcgggcctgctctcgggtcacgggg

SEQ ID NO: 37850 - DNA, 260 bp, Unknown
  Description of Unknown: RightRegion for integrase A418 sequence
ggggagctggaggacatggccctggagctggagtccgtggtggcggacgcgatggagtgacacggcacacatgaaggagggtcggcccccgccaagggaccggccctcctttgcgttgcgtcacggccggctgagcggagagtgacggaacggggtcccagggggcggaaaaagtgccctgggacccttctttcttacgtacgtctttagagaagaacaggcccagggcacttttcttgccccctgtccctggcgggccc

SEQ ID NO: 37851 - DNA, 260 bp, Unknown
  Description of Unknown: RightRegion for integrase A419 sequence
gttgggaagggtcgccggaatgtgccgatcggtgagggcatcgggctgacgtggctgtgagtcagcggcgccgcgcgcgtacacgccgcaaccggttcacgaggaccggcgcgtgcgcgagtgcttcggggtcctcgagcaaattgttgacgcgttgccagaaccgtgtgacggagatgccgaattcagcgtggacggcgtcggcctggttgccggcgtagttccatcggtgggcggcgaagtcgagcaatgcgcgatcg

SEQ ID NO: 37852 - DNA, 260 bp, Unknown
  Description of Unknown: RightRegion for integrase A420 sequence
gggcgctggacgccggaccggatccaggcgcgggtcgccggacaagatctgcccgtgtagtgacgaagtgacgtatttacgtaccttctacattcttttctcgagagagagagttctcgagggaagaatgtagaaggtacgtatttcggtaacttgtgtcactcaggccgcccccggaactatttccgacggatcctgagcacctgccacggcctggccatcttcttagtcgtcaccccgtaccgacgattaggaggccc

SEQ ID NO: 37853 - DNA, 260 bp, Unknown
  Description of Unknown: RightRegion for integrase A421 sequence
gtatttgaaaaaatcaagtaaaataaaaaggccccacgctcaactttggtcggtgcgagcgtgaggcgaatctagtacaagaaatcaggcattaaaaagccctttttcttgtacccattttatcattttttaggaaataagaaaagaggtacagcatggctgaaaaaagaaaagtagccatatattgcagggtttcatccatgcaccaggcaatagaaggttattcaatcgaacaacaacgagacagtttgacaaaatac

SEQ ID NO: 37854 - DNA, 260 bp, Unknown
  Description of Unknown: RightRegion for integrase A422 sequence
gccaagggcatgagcttcgaggaccagatcgtcgtggaacctcggtacgtggccgcgtagctgcccggaacgcaagaagccccgtcctccagaaggaggcggggctgtcttgtgtcaggcgacgtgtcggcgaggcggttggagctctccgaacagggtccgcacgatgcgggcctgctctccggtcggcggaggcggcgggttgtcagcccagtgccgctcccaccttgcgatgcggtcggacagggtcacggtgccac

SEQ ID NO: 37855 - DNA, 260 bp, Unknown
  Description of Unknown: RightRegion for integrase A423 sequence
gataatgagaacggtaaggtaaatacgcttgatataagggagattacttttaaattttaatagtagtagtgttacagggtaggtagtgcttgtaacactatttttatgtataaaaaaagaccgcaccatttaaggtacggtttatgtataggttgagactacaccttactttaggcagctttagagacattatatgttcttctcttatccacgccgtcccccgacgtactacctacacccgattggtaatgccaatcact

SEQ ID NO: 37856 - DNA, 260 bp, Unknown
  Description of Unknown: RightRegion for integrase A424 sequence
cggtgggagcttggcgtcgaagcgtatccgctgcgcatggcctcacgcattgatgcgtaacgcgcgctaacgtgtgcgctcacaactgaatatcgacaactgaatatggggtaccgctatgacggggcagcagcttgacgcatgggttgcgcagcaggtggcgcgtttcaagccgggcgatttggacgccggcattgaggtgatgaagcgcgctgcgcggcgccgcatgggggatcaacggaagcggcccgccgcgtaac

SEQ ID NO: 37857 - DNA, 260 bp, Unknown; identical to SEQ ID NO: 37841
  Description of Unknown: RightRegion for integrase A425 sequence

SEQ ID NO: 37858 - DNA, 260 bp, Unknown
  Description of Unknown: RightRegion for integrase A426 sequence
cggtgggagctgggcgtcgaggtgtacccgctgcgcatggccccgcacgctgatgcgtaacacgcgctagcgtgtgcgccacaactgaatatcgacaactgaatatggggttccgctatgacagggcagcggctcgacgcgtgggttgcgcagcaggtggcgcgtttcaagccaggtgacttggacgccggcattgaggtgatgaagcgtgctgcgcgccggcaaggtggcaccgaagggaagcaacccgccgcgtagcg

SEQ ID NO: 37859 - DNA, 260 bp, Unknown
  Description of Unknown: RightRegion for integrase A427 sequence
cggtgggagctgggcgtcgaggtgtacccgctgcgcatggccccgcacacagatgcgtaacacgcgctagcgtgtgcgccacaactgaatatcgacaactgaatatggggttccgctatgacagggcagcagctcgacgcgtgggttgcgcagcaggtggcgcgtttcaagccaggtgacttggacgccggcattgaggtgatgaagcgtgctgcgcgccggcaaggtggcaccgaagagaagcaacccgccgcgtagcg

SEQ ID NO: 37860 - DNA, 260 bp, Unknown
  Description of Unknown: RightRegion for integrase A428 sequence
cggtgggagctgggcgtcgaggtgtacccgctgcgcatggccccgcacacagatgcgtaacacgcgctagcgtgtgcgccacaactgaatatcgacaactgaatatggggttccgctatgacatggcagcagctcgacgcgtgggttgcgcagcaggtggcgcgtttcaagccaggtgacttggacgccggcattgaggtgatgaagcgtgctgcgcgccggcaaggtggcaccgaagagaagcaacccgccgcgtagcg

SEQ ID NO: 37861 - DNA, 260 bp, Unknown
  Description of Unknown: RightRegion for integrase A429 sequence
cggtgggagctgggcgtcgaggtgtacccgctgcgcatggccccgcacgctgatgcgtaacacgcgctagcgtgtgcgccacaactgaatatcgacaactgaatatggggttccgctatgacagggcagcggctcgacgcgtgggttgcgcagcaggtggcgcgtttcaagccaggtgacttggacgccggcattgaggtgatgaagcgtgctgcgcgccggcaaggtggcaccgaagagaagcaacccgccgcgtagcg

SEQ ID NO: 37862 - DNA, 260 bp, Unknown
  Description of Unknown: RightRegion for integrase A430 sequence
cggtgggagcttggtgtcgaagtgtatccgctgcgcatggcctcacgtattgatgcgtaacgcgcgctaacgtgtgcgctcacaactgaatatcgacaactgaatatggggtaccgctgtgacgggacagcagcttgacgcatgggttgcgcaacaggtggcgcgtttcaagccgggcgatttggacgctggcattgaggtgatgaagcgcgctgcacggcgtcgcatggggggtcaacggaagcggcccgccgcgtaac

SEQ ID NO: 37863 - DNA, 260 bp, Unknown
  Description of Unknown: RightRegion for integrase A431 sequence
gtcgggaagggccgccggaacgtgcccatcggtgagggcatcgggctcacctggctgtgagtcagcggcgccgcgcgcgtacacgccgcagccggttcacaaggaccggcgcgtgcgcgagcgcttcggggtcgtcgagcaggttgttgacgcgctgccagaaccgggtgatcgagatcccgaactcggtgcggaccgcgtcggcctggttgccagcgtagttccagcggtgggcggcgaagtcgagtagcgcgcggtcg

SEQ ID NO: 37864 - DNA, 260 bp, Unknown; identical to SEQ ID NO: 25639
  Description of Unknown: RightRegion for integrase A432 sequence

SEQ ID NO: 37865 - DNA, 260 bp, Unknown
  Description of Unknown: RightRegion for integrase A433 sequence
cacgtgtagattcgttaaaatactttattataggctcagtagttacattgcttattggtattgcaggtatagtttacgcaaactggcaggtaattagttcaatgttgcaattggcaaataataaataacatatagccctatacaagggcttttctttagacaaataaatcgaacatatattctgtttagggggaatccgaatggcagtaggtatttacattcgtgtttcgacagaggaacaggcaaaagaagggtactcc

SEQ ID NO: 37866 - DNA, 260 bp, Unknown
  Description of Unknown: RightRegion for integrase A434 sequence
tgtccggatggtcatggcccgtgagcgcgtgaccgcgaaggccctcgccgccgcgactggaatctcccgaagctacatgggcaagcgactgcgggacgaagcacccttctccctgaacgacgttgaggccatcagcaaggtgctcggcatcgaactgccagagctctagtcctcccccacgaaatgaacggaaagaagtaatgcgcgcagtcctctacctgcggcagtccgtagcccgagaggactccatcagcctggag

SEQ ID NO: 37867 - DNA, 260 bp, Unknown
  Description of Unknown: RightRegion for integrase A435 sequence
ccgcagaagctgcaacgcgagcaagacaagccgccgatcgaagtcctttggcgcacatagcaaaagcccctgcctggcgtgaatgccggacgggggctttgcttttcgagctagacgacggctgagagcgtgatctcgtaggcgagcctgttcagcgcagtgaggtcgtccagcaggtccttcgggtcgtcggtctgtgctgcgctggcgagcaggcccgtgctgaggttcacgagctggcgaaagttgatcgcggtcga

SEQ ID NO: 37868 - DNA, 243 bp, Unknown
  Description of Unknown: RightRegion for integrase A436 sequence
gaaaaaagactatgcgatgaactaaatatcgaatatataaatttaaaccttcgcactggacctagctatatatttaccgaagaagaatatcaggagttgaaatccgactacgccaaattgtttttacagttagaaaatattgatgaaaacaactagtatttattttgaaaggagcaattttatatgaaacgtgcagcattgtatatacgtgtatccacaatggaacaagccaaggaaggatac

SEQ ID NO: 37869 - DNA, 260 bp, Unknown; identical to SEQ ID NO: 25617
  Description of Unknown: RightRegion for integrase A437 sequence

SEQ ID NO: 37870 - DNA, 260 bp, Unknown
  Description of Unknown: RightRegion for integrase A438 sequence
aagaaatggaaaataatccggacaaaaaccaacatgctggaggtggtccaggaatgtcgttaacacaccctaatcaatcatatgatagttttagaaaagaagtaggaaaagcaagaagtgaagcaatagttgttcaacaataaaatttcgggtagctcgcctacccttattattttttgccaattttgaggagggaacacatgaaagtagcaatttacactagagtttcaagtgctgaacaggcaaatgaagggtattct

SEQ ID NO: 37871 - DNA, 260 bp, Unknown
  Description of Unknown: RightRegion for integrase A439 sequence
gtcgggaagggccgccgaaacgtccccatcggtgaaggtatcggcctcacctggctgtaactcagcggcgccgagaccgcagacgccgcaaccgattcaccaccactggtgcgtgcgcgagcgcgtcggggtcgtccagcaggttgttgacgcgctgccagaaccgggtgaccgtcatgccgaactcggtgcggaccgcctcagcctggttgccggcgtagttccagcggtgggcggcgaagtcgagcaacgcccggtcg

SEQ ID NO: 37872 - DNA, 260 bp, Unknown; identical to SEQ ID NO: 37341
  Description of Unknown: RightRegion for integrase A440 sequence

SEQ ID NO: 37873 - DNA, 260 bp, Unknown
  Description of Unknown: RightRegion for integrase A441 sequence
cgcaagttcgacacgcagaccgtcgtgtttaggccgcgcaacccggcggtgcagatgtagcctgctgatgctcgaccacaactgaatacgacaactgaataggttcgacatgcaacaactcgccgatttcgaggcgcagtatggcgccgacatggacgccgccgcggcacaattccctccaatgaccgatgcgcagcgggcgcgggtcgccacggttctgcgcggcaactcgacccggcacgcggcggcagcctagagcg

SEQ ID NO: 37874 - DNA, 260 bp, Unknown
  Description of Unknown: RightRegion for integrase A442 sequence
gtcgggaagggccgccgaaacgtccccatcggtgaaggtatcggcctcacctggctgtgactcagtggcgccgcgaccgcagccgccgcaaccgattcacgaccaccggtgcgtgctcaagcgccgccgggtcgtcgagcaggttgttgacacgctgccagaaccgggtgaccgagatgccgaactcagcttggactgcgtcggcctggttgccggcgtagttccagcggtgggcggcgaagtcgagtagcgcgcggtcg

SEQ ID NO: 37875 - DNA, 260 bp, Unknown
  Description of Unknown: RightRegion for integrase A443 sequence
gttgggaagggccgccggaatgtgccgatcggtgagggcatcggcctcacctggctgtgagtcagcggcgccgagaccgcagccgccgcaaccgattcacgagcgtcggggcgtacgcaagcgcctccgggtcgtccagcagattgttgacgcgctgccagaaccgggtgaccgtcatgtcgaactcagtgcggaccgcctccgcctggttgccggcgtagttccaccggtgggcggcgaagtcgagcaacgcgcggtcg

SEQ ID NO: 37876 - DNA, 260 bp, Unknown
  Description of Unknown: RightRegion for integrase A444 sequence
agtatcaaaattgataaaaaagacggagttacagaagtattagatatagaattttattagtgtttatgttacatttacacatgtaaagttcacgtatatacaaaaaaatcgacaaaacaaaagagcacagcgtgtataagtagtgttggtagcactcttataccgtccacctgattgcgccaggtaaacacttgccatactctcatgagttattttacatcatgcagggtctattaagcaacgtttaccaaattattggt

SEQ ID NO: 37877 - DNA, 260 bp, Unknown
  Description of Unknown: RightRegion for integrase A445 sequence
gatatttagaccagattcatatgataatcgtttcttcgattacacagtttcttatgaagagtctattaatataaaaattcacggtaaagtagtaatttacatagttgcattagactaacaactagatgaattaaatatttagcgctaaatatttaatggacagccttgctagctgtcctctttttaaaaggaggattattatgaccgttggaatttatattcgtgtttctactgaagaacaagtccgagatggattttct

SEQ ID NO: 37878 - DNA, 260 bp, Unknown
  Description of Unknown: RightRegion for integrase A446 sequence
gtcgggaagggccgccggaacgtgccgatcggtgagggcatcggcctcacctggctgtagctcagcggcgccgagaccgcagacggcgcagccgattcacgagagtcggggcgtgcgcgagcgcttccgggtcgtccagcacgttgttgactcgctgccagaaccgggtgaccgagatcccgaactcgttgcggaccgcctcggcctgattgccggcgtagttccatcggtgcgcggcgaagtcgagcaacgcccggtca

SEQ ID NO: 37879 - DNA, 260 bp, Unknown
  Description of Unknown: RightRegion for integrase A447 sequence
gtcgggaagggccgccggaacgtgccgatcggtgagggcatcggcctcacctggctgtgattcagcggcgccgagaccgtagacgccgcaaccgattcaccagggtcggggcgtgcgcgagcgcgtcggggtcgtccagcaggttgttgacgcgctgccagaatcgggtaaccgagatcccgaactcgttgcggaccgcctcggcctggttgccggcgtagttccatcggtgggcggcgaagtcgagcagagcccggtcg

SEQ ID NO: 37880 - DNA, 260 bp, Unknown
  Description of Unknown: RightRegion for integrase A448 sequence
gtcgggaagggccggcggaacgtgcccatcggtgagggcatcggcctcacctggctgtaactcagcggcgccgagaccgcaggcgccgcaaccggttcacgagcatcggtgcgtgtgcgatcgcctccgggtcgtcgagcaggttgttgacgcgctgccagtaccgggtgaccgtcatgtcgaactcggtgcggaccgcttcggcctgattgccggcgtagttccagcggtgggcggcgaagtcgagcaacgcccggtcg

SEQ ID NO: 37881 - DNA, 260 bp, Unknown
  Description of Unknown: RightRegion for integrase A449 sequence
gtcggcaagggacggcggaacgtccccatcggtgagggcatcggactcacctggctgtgactcagcggcgccgagaccgcagccgacgcaaccggttcacgaccaccggggagtgctcgagcgccgccgggtcgtcgagcagattgttgacgcgctgccaaaaccgggtgacggagatcccgaactcggcgtggaccgcggcggcgtggttacccgcgaagtgccaccggtgcgcggcgaactcgagcaacgcccggtct

SEQ ID NO: 37882 - DNA, 260 bp, Unknown; identical to SEQ ID NO: 37417
  Description of Unknown: RightRegion for integrase A450 sequence

SEQ ID NO: 37883 - DNA, 260 bp, Unknown
  Description of Unknown: RightRegion for integrase A451 sequence
atttcagaagatgggcagataagtgtaaaattcttagaggggacagaggtagacttgtaagtgactgtgactgaaaggttgcagtttttttcgtttttagtggtataatagccgtataaatcataattgatggtgaattacatggaaaataatttgaatttcgatatttacgagcatcactttggagcattatattatcacataaaatctttgattggggaatcccctatctatgatgaaactattgatgaggaagattt

SEQ ID NO: 37884 - DNA, 260 bp, Unknown
  Description of Unknown: RightRegion for integrase A452 sequence
caggtgggtgtcggtcgtcgcgggttgatcggcgaaggcgtggaattcacctggctctagaccggatccgtcggagccggttcaccgcgaccgggttgtgcgcgagcgcttcctcggtgtcgagtatccggttgaccttctgccagaagcgggtgaccgagatcccgaactcggcgcggatcccgtcggcctggtttcccgcgtagttccaccgtcgggcggcgaagtcgagcaatgctcggtcatcgtcggtcacgcga

SEQ ID NO: 37885 - DNA, 260 bp, Unknown
  Description of Unknown: RightRegion for integrase A453 sequence
caggtggggatcggtcgtcgcgggttgatcggcgaaggcgtggaattcacctggctctagaccggagccgacgtagccggttcaccgcgaccggattgtgcgcgagcgcttcctctgtgtcgagtatccggttgaccttctgccagaagcgggtgaccgagatcccgaactcggcacggatcccgtcggcctggtttcccgcgtagttccaccgttgggcggcgaagtcgagcaatgctcggtcgtcgtcggtcacgcga

SEQ ID NO: 37886 - DNA, 260 bp, Unknown
  Description of Unknown: RightRegion for integrase A454 sequence
atctcagaagatgagcagataagcgtaaatttcttagaggggactgaggtagacttgtaagtgactgtgaccgaaaggttgcagtctttttgtaaatttagtggtataatattccttgaaggcgcttttcaataaaatttgagtgataacaagaaaactttgtgcagatgacttaccagaagaagtaatttcttgtaaggttctgtctagtcgacatggagaagaaaagaaagatgaatttaacaacagaaagattgacc

SEQ ID NO: 37887 - DNA, 260 bp, Unknown
  Description of Unknown: RightRegion for integrase A455 sequence
tgttcatcgtcataaatatcaaattcactactataattttcaactgattcttttatataagctatttctgcgtcagtaaattttacacacatttcatcacctactttttattttattatatcacatttagtacctagtactaaaatcacgggtagcccgcctacccttattattttttgccaattttgaggagggagcacatgaaagtagcaatttatactagagtgagtacacttgaacaaaaagaaaaaggacactct

SEQ ID NO: 37888 - DNA, 260 bp, Unknown
  Description of Unknown: RightRegion for integrase A456 sequence
tgaactacactctctttgatggtatattacatatatacaaaacaagccgctgaaatatttgcggcaagcttcaaattagacaagtcgctgaaatatttgcgacatgagagggtgcatctgcgctctctctttttttatacaattttcacgggtagcccgcctacccttattattttttgccaattttgaggagggagcacatgaaagtagcaatttatactagagtgagtacacttgaacaaaaagaaaaaggacactct

SEQ ID NO: 37889 - DNA, 260 bp, Unknown
  Description of Unknown: RightRegion for integrase A457 sequence
ctaccttctaaagtttcaatataggtagttctatctgctttttctgcattaactataactggtttttttctaacctttactttaggagacatattatcacctacttttttattttattatatcacatttaatactaaggactaaatcacgggtagcccgcctacccttattattttttgccaattttgaggagggagcacatgaaagtagcaatttataccagagtaagtacacttgaacaaaaagaaaaaggacactct

SEQ ID NO: 37890 - DNA, 260 bp, Unknown
  Description of Unknown: RightRegion for integrase A458 sequence
gaataaggtgttactataacaatatattagggaaatatccctaaacctttttgatattcgctattcttatttgaatagtaaacttgaaatcttataaatataagtggcacctattttatataggtgtctttttttatgtgataaattcttgggtaattcgtctacccttatattttttacttttttaaggaagtgagaacatgaatgtagcaatttattgtcgtgtcagtacactagagcaaaaagaacatggctattct

SEQ ID NO: 37891 - DNA, 260 bp, Unknown
  Description of Unknown: RightRegion for integrase A459 sequence
tacagtaaaacgtgtaagacgtactgaaacaaaattacatttagatccagtaagttattcagatgaatttaaaacaaatacttttgatttagaaagcttagaagaaatagaagtaatcggaaaagtaatttataactaccaaatatttgagtaagggtactacattttgtggcacccttttcttttaaaggagtgataacttgaacgtagcaatatattgtcgtgtcagcacattagagcaaaaagaacatggctattct

SEQ ID NO: 37892 - DNA, 260 bp, Unknown
  Description of Unknown: RightRegion for integrase A460 sequence
gcgctcgtacaccgtcaatcagttgtagaaaatggagacatggccttgatcgccgtaaataatgaaatattgatcagacgcgtttataaagataagaatgaaattacgcttgatgcattattgagaaaacaaactattgatgaaagagaaactttattctctgttatcggaaaagtaacaaaggttataggtgaatactaatgaagtgtgcaatatatagaagagtttctacagatgaacaagcggaaaaaggattctca

SEQ ID NO: 37893 - DNA, 260 bp, Unknown
  Description of Unknown: RightRegion for integrase A461 sequence
acattagttgataaagttataattgatggtaatcaaactcgtatttactggagattctaattttgttaatttgggagaaagaatattaatactttctcccaaaacaacaatcctcccggttcgtatttagataatcatactacattgtttatttcaagtaaaggcagtttagttttttattaaatataatagttacgttatctttggattatttacgcatattctaattcttaaaatagcaatttaaaggattacttaac

SEQ ID NO: 37894 - DNA, 260 bp, Unknown
  Description of Unknown: RightRegion for integrase A462 sequence
cgcccgcgcaagttcgacttcgcaccgggcaccgtgctgctgcgcgaatggggcgagcgcgagcatcgggtgacggtcaatgccgagggccatttcgagtacgagggccacaccttcaagagcttgacggcggtggctcggcacatcaccggccagcattggagcggcccgctgttcttcggtctgaaaggaggcgcctgatgacggaaatcgcctccactaaggcgcgcaaacgctgcgcggtctactgccgggtgtcg

SEQ ID NO: 37895 - DNA, 260 bp, Unknown
  Description of Unknown: RightRegion for integrase A463 sequence
aagaaatggaaaataatccggacaaaaaccaacatgctggaggtggtccaggaatgtcgttaacacaccctaatcaatcatatgatagttttagaaaagaagtaggaaaagcaagaagtgaagcaatagttgttcaacaataaaatttcgggtagtccgcctacccttattattttttgccaattttgaggagggagcacatgaaagtagcaatttatactagagtaagtacacttgaacaaaaagaaaaaggacactct

SEQ ID NO: 37896 - DNA, 260 bp, Unknown; identical to SEQ ID NO: 21221
  Description of Unknown: RightRegion for integrase A464 sequence

SEQ ID NO: 37897 - DNA, 260 bp, Unknown; identical to SEQ ID NO: 24408
  Description of Unknown: RightRegion for integrase A465 sequence

SEQ ID NO: 37898 - DNA, 260 bp, Unknown; identical to SEQ ID NO: 24408
  Description of Unknown: RightRegion for integrase A466 sequence

SEQ ID NO: 37899 - DNA, 260 bp, Unknown
  Description of Unknown: RightRegion for integrase A467 sequence
gaatatgtaaaacttaagaacaggcattccattgaaataaaagatatagaattttattaacatatgtacggaagtatagacacctgattaatatttaaggcgtatacttccgtaaaaaataacccacgcccataaagaacgtggtttagaacatagtatcaatttaaaattgggaacaaaaattattatacaataaaaaagagggtagacatagcgactacccttgtataatgacgtggtaattatattataacagatta

SEQ ID NO: 37900 - DNA, 260 bp, Unknown; identical to SEQ ID NO: 24902
  Description of Unknown: RightRegion for integrase A468 sequence

SEQ ID NO: 37901 - DNA, 260 bp, Unknown
  Description of Unknown: RightRegion for integrase A469 sequence
gagtatgtaaagtttaaaaacaggcattctatcaaaataaatgatatagaattttattaacatatgtacggaagtatagacactcgattaatatttaatgtgtatacttccgtatttttatttatagaacccgtcgaatttgatggatttagattatccgtgtcgaaatcgaggcggttaaaataaaaaagaccgcaccttttaaggtacggtttgaacgatttactcatttaaaacacaaataataaaactaaaattat

SEQ ID NO: 37902 - DNA, 260 bp, Unknown
  Description of Unknown: RightRegion for integrase A470 sequence
gaatatgtaaagcttaaaaataggcattctattaaaataaacgatatagaattttattaacttatgtacggaagtatagacactcgattaatatttaatgtgtatacttccatatatttttgtataaaacccgtcgaattcgacgggtttagattatccgtatcgaaatcgaggcggttgaaataaaaaaagaccacccagtgacatgtgtgggtagttaaaagtaaacggtgcagtcagcttcttactgctaaacgcaa

SEQ ID NO: 37903 - DNA, 260 bp, Unknown
  Description of Unknown: RightRegion for integrase A471 sequence
cgcggcccggggtttgacccgtcgagcgtgcggttcgtgtggggccgatctgcagattgacgctcggcatgcaccgatgcgcacgcgtcggcgggtgttttagggtgcccgcacggcggtgcgtcgaagtgtgcatcgcagcacaattgaatacatacaacagaatagagcccggcaaatgcgcacgatcagcgttgaagagtacgccgaacaggtcgccgcggcggcaccgccgttgacggacgcgcagcgtggacggc

SEQ ID NO: 37904 - DNA, 260 bp, Unknown
  Description of Unknown: RightRegion for integrase A472 sequence
ctcgaatgtttaatcgaaaagaacggtggtcaatttaactattctaatgtaattacacattataatttaaagatgggccaagaaatttacttaaaataaaaaataacgcaccctccggccaagaagatgtgcgttaaaaatagaaccaaaataggcttatttagttacgcctattttaccaaaaataatgaggtgaaacaatggcaaatgaaataaaacaagttgcgttatacatacgtgtgtctacagatcaacaagct

SEQ ID NO: 37905 - DNA, 260 bp, Unknown
  Description of Unknown: RightRegion for integrase A473 sequence
attgaggaagagttaatagaagaaatgaaggttattaatgaccaaaaatacaacatttaatatgttgtatcttaagctcaaaattgagcttaaaaataactcaattttaaaatttaaaaacaatactttaattacttaattaacaaaacaggtaataaatatgattgaacgcagtcttgctctattctttggtttaattgtaggtatcgtaggatacatatattcaaccaaaaagaaaactattaaagaaaattttttac

SEQ ID NO: 37906 - DNA, 260 bp, Unknown; identical to SEQ ID NO: 37892
  Description of Unknown: RightRegion for integrase A474 sequence

SEQ ID NO: 37907 - DNA, 260 bp, Unknown
  Description of Unknown: RightRegion for integrase A475 sequence
atggattcgatgcaactctaaaaagattttataagttccaagatggaattactttagaacctgaaagttataatcctgaatataaaacacaattttttgattctaaaacacaggaacacactcctgttgtagtaaaaggaaaattagtttggtatatggcaccacttaacgttaaattctaagtgtaagaggtgattattttgactaaggctgctatatatattcgtgttagtactcaagaccaagtagaaaattatagt

SEQ ID NO: 37908 - DNA, 260 bp, Unknown; identical to SEQ ID NO: 21696
  Description of Unknown: RightRegion for integrase A476 sequence

SEQ ID NO: 37909 - DNA, 260 bp, Unknown
  Description of Unknown: RightRegion for integrase A477 sequence
acaacacgaccggaaaaataccaaacggaaaaaatatgaatgcacaattccatgcagggattaatgaaagcggaaatattgaaatcatctttaacttattttccgatgcaaatttaacttttcatgcaaaaatttaaaagagagcctcctggcttttctttttaccgaaaaaagaacatacgtacggaaggagaaaggaaatgaaggcagctatttatatacgtgtttctactcaagagcaagtagaaaattattcaata

SEQ ID NO: 37910 - DNA, 260 bp, Unknown
  Description of Unknown: RightRegion for integrase A478 sequence
atctaaaatagtagaaaatatatatcaagaaatgaataaagaacaaaaagaaagcctaggattaaaaaatcatgaatttaaaaaaaatgctgagttaagtgataaagcaagaaaattaatatttagtggtaattaaaagagagccattaggcttttctttttaccaaaaaaaagaacgtatgtgcgaaaggagaacggaaatgaaggcagctatttatatacgcgtatctactcaagaacaaatagagaattactctata

SEQ ID NO: 37911 - DNA, 260 bp, Unknown
  Description of Unknown: RightRegion for integrase A479 sequence
atggattcgatgcaactctaaaaagattttataagttccaagatggaattactttagaacccgaaagttataatcctgaatataaaacacaattttatgattctaaaacacaagaacacactcctgttgtagtaaaaggaaaattagtttggtatatggcacctcttaacgctaaattttaaatgtaaaaggtgattattttgactaaagcagctatatatattcgtgttagtacgcaggaccaaattgaaaactatagt

SEQ ID NO: 37912 - DNA, 260 bp, Unknown
  Description of Unknown: RightRegion for integrase A480 sequence
tgtggagaaccatcagaactcaattttgagttttgactcatatcagacgggctcaattttgagccggttaaaagttggccacaattagacaacgcataatccaattttggattttgataaaagaatttagccgggctcaatttagatccgggctccatatcacgagagcgcaattttgcgctctcctctaaatcgttgatatgttggaggtatgtatgaagatagcagtttatgtcagagttagcacgttggaacaagcg

SEQ ID NO: 37913 - DNA, 260 bp, Unknown
  Description of Unknown: RightRegion for integrase A481 sequence
gttatcaacgaccaaaaatacaaaattttaaaattgtcaccgaagaaagtttttgattaattttaatgatactaagtatcattaaaattattaacgtattttttttgaagtaccacagttggggtcgtcaaccaccaattttttatccataaaattttgcataattttagtacacaagtagttaatatcttgggcattccaaaatgcaactcttttgtaatctcttagagtaccaccactctctaaaatattagtaaatt

SEQ ID NO: 37914 - DNA, 260 bp, Unknown
  Description of Unknown: RightRegion for integrase A482 sequence
agtgaagaagagttagtggaagaaatgaaagtgatcaacgaccaaagatacaacgtttaaaggttaaatataccttaaaaatcaaaaagtggctaccctccactagttgatttaatgaccgaatgggccattaaattaaaaacttgaacttaaccgaagggggtccccttcggttagaagacataattgattacactctttaactctttaaaattgaattccttcttattaaaaaattattaataaaaatggcaatagtt

SEQ ID NO: 37915 - DNA, 260 bp, Unknown
  Description of Unknown: RightRegion for integrase A483 sequence
actgaagaagagttaattgaagaaatgaaggttacaagcgaaagtaaacgtaatatttaaattaataaatttaaattattaataaatgggtaacactaccgcgtccgaaagtactattgaaccagaagataattgtgaacacggttttgataccaataccggttcttataatcatttgaacaatgatagtttggagtctatccactataaaaatgattataatggcgaaattctagaaggacatcctgtagctgatgtcc

SEQ ID NO: 37916 - DNA, 260 bp, Unknown
  Description of Unknown: RightRegion for integrase A484 sequence
gtcaggggagcccccgtcaggggtcagtctccaggagccgtttcaatgccaacgtacgatagatccatgcgcgtgataggccgactgagaatctcctgacaaaccgaggagtctacgtctatcgaacgtcagcgtgagctcatacagaactggctgatacccacgatcacgagatcgtcgggtgggccgaagacaaggatgtgtccggttcggtagacccgttcgacaccccagggctcggtccctggttgaagcgtgac

SEQ ID NO: 37917 - DNA, 260 bp, Unknown
  Description of Unknown: RightRegion for integrase A485 sequence
actgaaaaagagtttattaaaaaaatgaaggttattaataaccaaaaattatatgtttagattttaatgtttaattaaacattaaaattcatttgtagaaaattgatttttttttaaaaaaaaatagttaaataaactatacaatggaagacaaaaatattattatcaacgatactaaatataacttcttcaaattctataacgtaaatcaaccactaactgaacttaaatacttcaattgtgaaagattggtttttgca

SEQ ID NO: 37918 - DNA, 260 bp, Unknown
  Description of Unknown: RightRegion for integrase A486 sequence
ccccaggtgaagtcgcggctcgctcccctgtcgtcggtcgagcgagtgatcatctcctgaacgcagaaaagccccgcactccacaagggagccggggctgtctgctacgcggtgagtccgagaaggactctcaccacgcgaacttgctcgggagtgggaggcggaggcgcgggcctctgcctgtccagctcgatggcttcggcgagggtcagggcgcgaccctcccgtgcttctggaagcaccgccaggtgatcggcatc

SEQ ID NO: 37919 - DNA, 260 bp, Unknown
  Description of Unknown: RightRegion for integrase A487 sequence
acccaagatgagttgatagaagaaatgaaggttacaagtaaccaaaagtacaatgtttaaaaaagttttttaatgcttttagaaaagcatgtcaggaagtcatactgtatttttaaatggtacttcatattcatcaagcataaatttaatggtttaaataaccattaaatttaaacaaaacgatcaataataagatgagagttattggttgctggagaaccatctattgttacaatgtttggtccaacattttgaagttt

SEQ ID NO: 37920 - DNA, 260 bp, Unknown; identical to SEQ ID NO: 37918
  Description of Unknown: RightRegion for integrase A488 sequence

SEQ ID NO: 37921 - DNA, 260 bp, Unknown
  Description of Unknown: RightRegion for integrase A489 sequence
ccccaggtgaagtcgcggctcgctcccctgtcgtcggccgagcgagtgatcatctcctgaacgcagaaaagccccgcactccacaagggagccggggctgtctgctacgcggcgagtccgagaaggactctcaccacgcgaacttgctcgggagtgggaggcggaggcgctggcctctgcctgtccagctcgatggcttcggcgagggtcagggcgcgaccctcccgtgcttctggaagcaccgccaggtgatcggcatc

SEQ ID NO: 37922 - DNA, 260 bp, Unknown
  Description of Unknown: RightRegion for integrase A490 sequence
ccccaggtgaagtcgcggctcgctcccctgtcgtcggccgagcgagtgatcatctcctgaacgcagaaaagccccgcactccacaagggagccggggctgtctgctacgcggcgaatccgagaaggactctcaccacgcgaacttgctcgggagtgggaggcggaggcgctggcctctgcctgtccagctcgatggcttcggcgagggtcagggcgcgacccccccgtgcttctggaagcaccgccaggtgatcggcatc

SEQ ID NO: 37923 - DNA, 260 bp, Unknown
  Description of Unknown: RightRegion for integrase A491 sequence
ccccaggtgaagtcgcggctcgctcccctgtcgtcggccgagcgagtgatcatctcctgaacgcagaaaagccccgcactccacaagggagccggggctgtctgctacgcggtgagtccgaggaggactctcaccacgcgaacttgctcaggagtgggaggcggaggcgctggcctctgcctgtccagctcgatggcttcggcgagggtcagggcgcgaccctcccgtgcttctggaagcaccgccaggtgatcggcatc

SEQ ID NO: 37924 - DNA, 260 bp, Unknown
  Description of Unknown: RightRegion for integrase A492 sequence
ccccaggtgaagtcgcggctcgctcccctgtcgtcggctgagcgagtgatcatctcctgaacgcagagaagccccgcactccacaagggagccggggctgtctgctacgcggcgagtccgaggaggactctcaccacgcgaacttgctcgggagtgggaggcggaggcgcgggcctctgcctgtccagctcgatggcttcggcgagggtcactcgacccgctcctcgccgtacacccgactgatctcctcgcgaaggtgg

SEQ ID NO: 37925 - DNA, 260 bp, Unknown; identical to SEQ ID NO: 37921
  Description of Unknown: RightRegion for integrase A493 sequence

SEQ ID NO: 37926 - DNA, 260 bp, Unknown
  Description of Unknown: RightRegion for integrase A494 sequence
accgaagaagagttgatggaagagatgaaggttatcaacgaccaaaaatacaatgtttaggtatttaaaaatttaatggttaaaaaactattaaatttaaacaaaacgatcaatgataagatgagagttattggttgctggagaaccatctattgttacaatgtttggcccgacattttgaagtttaaccgaaaaagtaaactgtgaaagtggagaaaccgattttaatgctaccaattccacttgatttacgaaacctt

SEQ ID NO: 37927 - DNA, 260 bp, Unknown
  Description of Unknown: RightRegion for integrase A495 sequence
gacgaaaataaattagtggaagaaatgaaggtcattaacgatagtaaacgtgacatttaaaatattaatttttaaagttcaattgaactttaattaatttttaaagttcaatcaaactttaaaaatttaaacaatacatttgccaatttttgatttagaagagtgaaagtccacaaataatgatggatctttccattcgatatggttaatacaatccgtaaaatatttaaacgattttatatctttagttttactttcag

SEQ ID NO: 37928 - DNA, 260 bp, Unknown
  Description of Unknown: RightRegion for integrase A496 sequence
gatgagcaagaattagtggaagaaatgaaggttataaacgatagtaaaagagatgtttaattttaattaaaataattttaatgatacttagtatcattaaaattaacgtattttttttgaagtaccacagttggggtcatcaactaccaattttttatccataaaattttgcataattttagtacacaagtagttaatatcttgcgcattccaaaatgcaactcttttgtaatctcttaaggtaccgccagactgtaaaa

SEQ ID NO: 37929 - DNA, 260 bp, Unknown
  Description of Unknown: RightRegion for integrase A497 sequence
gatgaagaaaaattagtggaagaaatgaaggctacagatagtagtaaacgagatatttaaattattttaatgctaaagaagcattaaaataaatgcttataaatggtataatagctatatctcaagatggtggaattggaagtaataacactcttccttggaaattgaaagaagaacttaaacattttcaagatgttacgacttctactcaagatagtagtaaaaaaaatgctgttattatgggtcgaaaaacatgggat

SEQ ID NO: 37930 - DNA, 260 bp, Unknown
  Description of Unknown: RightRegion for integrase A498 sequence
tttaattgatgatttagaaaatttggcagatcatcaacctaacaatgttatttgtgttaaaccatttttttatgataaagaagaagcctacgaagataaagaattatttaaagttaaagatgctttaattaaaattacttaatttttagaaaaaatttattttttaacaattttttattgttaaaaaatacattaaataaatggaaacaaaaccaagactgacaattgaacaacgtgcaaatgtttttaaaaaataccaa

SEQ ID NO: 37931 - DNA, 260 bp, Unknown
  Description of Unknown: RightRegion for integrase A499 sequence
aaaaaattctaacagttgataaagttaaccataattctcatttgtttgttaatgcaaaattagaagaaaaagagccagaagtgtgtactttttgtgaaggttgataaaatttaatttttaaagtctaattagactttaaaaattgtgaataaatatgtataaaaatttttttagtttattttttaaactaaaaaaaagtaatgcaaggaagttataaaaacaagttaacgttggaacagcgtaataccatagttcaaatg

SEQ ID NO: 37932 - DNA, 260 bp, Unknown
  Description of Unknown: RightRegion for integrase A500 sequence
ccttcacaaatagatgaatggaacaaaacaaaaccaactactcacgatgaatcacaaatggaacaagtaccacaagaccattctggtggccacccctcaattttcggaacagatacgccaccaaaaaaataattaaataaatttatatgggtagtccgtctacccttattattttttacttttttagggagtgatgaattatgaacgtagctatttacgttcgtgtcagtacgttagagcaaaaagaacacggtcattct

SEQ ID NO: 37933 - DNA, 260 bp, Unknown
  Description of Unknown: RightRegion for integrase A501 sequence
gatgaagaaaaattagtggaagaaatgaaggctacagatagtagtaaacgagatatttaaattattttaatgctaaagaagcattaaaataaatgcttataaatggtatagtagctatatctcaagatggtggaattggaagtaataacactcttccttggaaattgaaagaagaacttaaacattttcaaaatgttacgacttctactcaagatagtagtaaaaaaaatgctgttattatgggtcgaaaaacatgggat

SEQ ID NO: 37934 - DNA, 260 bp, Unknown
  Description of Unknown: RightRegion for integrase A502 sequence
actgaagaaaaattaatggaagaaatgaaggttattaacgaccaaaaatataatgtttaaattaaggttttttaatctctgtatatagagattaaaaaacatgtttgaaattgtgtaatttcaaacaggtaataaatatgattgaacgcagtcttgctctattctttggtttgattgtaggccttatgggttacatatattcaaccaaaaagaaaactataaaagaaaattttttacccgctatgacttataaagtagac

SEQ ID NO: 37935 - DNA, 260 bp, Unknown
  Description of Unknown: RightRegion for integrase A503 sequence
accgaaaaagagttaatggaagaaatgaaggttattaatgaccaaaaatataatgtttaaattaaggttttttactctctatacacagagattaaaaaacatgtttgaaattgtgtaatttcaaacaggtaataaatatgattgaacgcagtcttgctctattctttggtttgattgtaggccttatgggttacatatattcaaccaaaaagaaaactataaaagaaaattttttacccgctatgacttataaagtagac

SEQ ID NO: 37936 - DNA, 260 bp, Unknown; identical to SEQ ID NO: 37417
  Description of Unknown: RightRegion for integrase A504 sequence

SEQ ID NO: 37937 - DNA, 260 bp, Unknown
  Description of Unknown: RightRegion for integrase A505 sequence
atttcagaagatgggcagataagtgtaaaattcttagaggggacagaggtagacttgtaagtgactgtgactgaaaggttgcagttttttcgttttagtggtataatagccgtataaatcataattgatggtgaattacatggaaaataatttgaatttcgatatttacgagcatcactttggagcattatattatcacataaaatctttgattggggaatcccctatctatgatgaaactattgatgaggaagatttaa

SEQ ID NO: 37938 - DNA, 260 bp, Unknown
  Description of Unknown: RightRegion for integrase A506 sequence
cattaaggaaggaaaagcagcttgtcaagggatgcgtgtgccagaagtagacatttcaaattgggagataacctcaccaattacagtattagaaagggatagaaatggggaaaagtattacagttattccggccaagaaagtgcagaccagcgttcttcatcaggtcaggaagaaaatcaaggtagccgcatattgtcgagtgtccaccgaccaagaagaacagctatcaagttatgaaaaccaagttaattattacaga

SEQ ID NO: 37939 - DNA, 260 bp, Unknown
  Description of Unknown: RightRegion for integrase A507 sequence
gataggattgagatatttgagaacggggatataaaaatcgtctacaggatagaaatgtagtctttactagctacaattatgcataacaaatgaaatgtataattgtaactagtaattacagttataaaaactttctcaatatttttcagaagaatgggagaatacatgttctcatttatatggtagaatattttgtaaatacagggagaagacgttatttgtttgagatgaagggggcttttcaattgagatttcacaaa

SEQ ID NO: 37940 - DNA, 60 bp, Unknown
  Description of Unknown: RightRegion for integrase A508 sequence
attgtggaggatggacagataactgtcagatttttagaggggactgaggtagaattataa

SEQ ID NO: 37941 - DNA, 60 bp, Unknown
  Description of Unknown: RightRegion for integrase A509 sequence
atttcagaagatgggcagataagtgtaaaattcttagaggggacagaggtagacttgtaa

SEQ ID NO: 37942 - DNA, 260 bp, Unknown
  Description of Unknown: RightRegion for integrase A510 sequence
atctcagaagatgggaagataagtgcaaaattcttagaggggactgaggtagatttgtaagtgactgtggccgaaaggttgcagtttttttcgtttttagtggtataatagccgtataaatcataattgatggtgaattacatggaaaataatttgaatttcgatatttacgagcatcactttggagcattatattatcacataaaatctttgattggggaatcccctatctatgatgaaactattgatgaggaagattt

SEQ ID NO: 37943 - DNA, 260 bp, Unknown; identical to SEQ ID NO: 37414
  Description of Unknown: RightRegion for integrase A511 sequence

SEQ ID NO: 37944 - DNA, 260 bp, Unknown
  Description of Unknown: RightRegion for integrase A512 sequence
atctcagaagatgggcagataagtgcaaaattcttagaggggactgaggtagatttgtaagtgactgtggccgaaaggttgcagtttttttcgtttttagtggtataatagccgtataaatcataattgatggtgaattacatggaaaataatttgaatttcgatatttacgagcatcactttggagcattatattatcacataaaatctttgattggggaatcccctatctatgatgaaactattgatgaggaagattt

SEQ ID NO: 37945 - DNA, 260 bp, Unknown
  Description of Unknown: RightRegion for integrase A513 sequence
gaaaagttgatagaagaaatgaaagttattaacgatcaaaaacttaatattagaatttaattatatttttaatggttattaaccattaaaaactactgaaggtatcccaattgttttaactttaattgaaggtaaccaccaatatcatttaattttatggtataaggcacctcaattaaatttataccattctcttgacacattcgtcttttaagttcatctctatatttttggttggttgaagcatcagtatttcgatg

SEQ ID NO: 37946 - DNA, 260 bp, Unknown
  Description of Unknown: RightRegion for integrase A514 sequence
ttagaagaagaacttattaaagaaatggaggttattaacgaccagagatacaacgtttaagtttattattttttaaactcatttttgagtttaaaaaattatattaattccggtaaaagtaaaccataaaaccaatttccattaacattaattgtaatagcatcgattgatggatcttttgttccaatagaatactgttttacactctgttgattaaaaacagttacgtttacttttgtttcatcgagaacaattttggt

SEQ ID NO: 37947 - DNA, 260 bp, Unknown
  Description of Unknown: RightRegion for integrase A515 sequence
actgaagaaaaattaatggaagaaatgaaggttattaacgaccaaaaatataatgtttaaattaaggttttttaatctctacacccagagattaaaaaacatgtttgaaattgtgtaatttcaaacaggtaataaatatgattgaacgcagtcttgctctattctttggtttgattgtaggccttatgggttacatatattcaaccaaaaagaaaactataaaagaaaattttttacccgctatgacttataaagtagac

SEQ ID NO: 37948 - DNA, 260 bp, Unknown
  Description of Unknown: RightRegion for integrase A516 sequence
ctgtcgaacatgaccgtggatgaccacgtcaccatcgagtggcgagacgtggccgagtagcagatacgacgaagccccggctacccccttctgagggtgccggggctttcgtgtgtcagttgtggtggccgctctccaggcggtcgatctcttcgagggacgcttcgtagttgccggcctcctggaggaggagcaggcggaggtcggcgagcttgacctgcacccacacggggagcttcttctcgcgctcgctgttgaag

SEQ ID NO: 37949 - DNA, 260 bp, Unknown
  Description of Unknown: RightRegion for integrase A517 sequence
gatgagcaagaattaatagatgaaatgaaggttatcaatgatcagcggtataacatttaattttttatttttaagttcatttgaacttaaaaataatttaatttaaagaattaaaatgggtatctataattacttaattatcaaacaggtaataaatatgattgaacgcagtcttgctctattctttggtttaattgtaggccttatgggctacgtatattcaaccaaaaagaaaactattaaagaaaattttttaccat

SEQ ID NO: 37950 - DNA, 60 bp, Unknown
  Description of Unknown: RightRegion for integrase A518 sequence
cttggagaagacggcagcatcaccattaagtttttagaaggaacagaagtgaatttataa

SEQ ID NO: 37951 - DNA, 60 bp, Unknown
  Description of Unknown: RightRegion for integrase A519 sequence
atatcagaaagtgggcagattactgtaacatttctcgaaggaacagaagttgacttataa

SEQ ID NO: 37952 - DNA, 260 bp, Unknown
  Description of Unknown: RightRegion for integrase A520 sequence
tacgagcagcatctcaggctcggcagcgtggtcgaacagctacacgccgggatgtcgtagagcggctacccccgagaacgcagaaaagccccctacgcgccgtgtaagggcacgcagagggctctctggtagtctctattcagttgtgtggttgcgtccgtcagcgtggacgctagaggggtttacggggcctttccagcctggcgtctgcgcccgcctgtaagggtgtgtgagcagtgcagtacgggtctacccggctg

SEQ ID NO: 37953 - DNA, 260 bp, Unknown
  Description of Unknown: RightRegion for integrase A521 sequence
gagcaagaattggtggaagagatgaaggtcataaatgatcaaaaacttgatattaaatagactatatttaacaatttttaatagttaattaaccattaaaaattactgaagatatcctaattgttttaactttaattgaaggtaaccgccgatatcatttaattttatggtataaggtacttcaattaaatttataccattttcttgacacattcgtcttttaagttcatctctatatttttggttcgttgaagcatcaa

SEQ ID NO: 37954 - DNA, 260 bp, Unknown
  Description of Unknown: RightRegion for integrase A522 sequence
tacgagcagcatctcaggctcggcagcgtggtcgaacggctacacgccgggatgtcgtagagcgactacccgagaacgcagaaaagccccctacgcgccgtgtaagggcacgcagagggctctctggtagtctctattcagttgcggggttgcgtccgtcagcgtggacgctagaggggtttacggggcctcgtggacccgtacgtacggctgcagaggcttgtcacggtaggcgtggtagcgctcggcctcctcgacgc

SEQ ID NO: 37955 - DNA, 260 bp, Unknown
  Description of Unknown: RightRegion for integrase A523 sequence
gaagaagaagagttgttggaagagatgaaggttatcaacgaacagaagtatgatgtttaacaagtaattctttaatggttttaaaaccattaaagtttttatttatttttagtagatgcaatgaaggttagccaaaaaaatgtttttaaagtctaattagaaattaaaaacaatcgtttgaaacagtcaagatcgaagcgttaaaaaataaaatgaaatttaattaataaaaaagagtaaaataaactatgactaaaaat

SEQ ID NO: 37956 - DNA, 260 bp, Unknown
  Description of Unknown: RightRegion for integrase A524 sequence
gtacgaaaggacgtgattagggacatgaaagtagcactttatgtccgtgtcaggtatcgacactagaacaagcagaagaaggttactcaattaatgaacaaaaagataaacttaaaaaatattgtgaaattaaagattggacgattgttaaagagtacgtagatcctggtcgctccggatcaaatatcaatcgccccagcatgcaacagcttatcaaagatgcagatacaggattatacgatgctgtgcttgtctataaa

SEQ ID NO: 37957 - DNA, 260 bp, Unknown
  Description of Unknown: RightRegion for integrase A525 sequence
attatccaagtcaacagtagtggatactccaggatctaatgtaactcctggtaatgataattttggtgcaagtttaacctccatttattttatactttattcatcctcatcttcatcaaatggattagtcgaccttggtcttgaagggatatgtaaaaaatttttttaaaaaaaaatttaccatttgtgtaataataaagatgagttcgcataaattgacaatagaagaacatcaaactattattgatttgtataacaat

SEQ ID NO: 37958 - DNA, 260 bp, Unknown
  Description of Unknown: RightRegion for integrase A526 sequence
aatattggtaaaagttcagttaaagagtttaagacaattcaacttgcaattgtagaataactcaagtatacttatttaaagccgcttgagaaatcggcgacttttgttttataaaggaggaaatatggaatataaagcaggtgatatagtggttgctagaaatattcataatgaaaataaggaatttattttcgaggttgacgatattgttgtacaagatggggtacaacttctttatggtaaagatgtttttagcggaa

SEQ ID NO: 37959 - DNA, 260 bp, Unknown
  Description of Unknown: RightRegion for integrase A527 sequence
aatattggtaaaagttcagttaaagagtttaaaacaattcaacttgcaattgtagaataaataaggtatagttgttttgggccgtttgatgagagtcggcggcttttgttttataaaggaggaaatatggaatataaagcaggtgatatagtggttgctagaaatattcataatgaaaataaggaatttattttcgaggttgacgatattgttgtacaagatggggtacaacttctttatggtaaagatgtttttagcgg

SEQ ID NO: 37960 - DNA, 260 bp, Unknown
  Description of Unknown: RightRegion for integrase A528 sequence
gttgaaatttaggaaagtgatctatggctgattttacaggaaaaacagctacattatcaaatacatagaaatggtcaataaccacttcaacgtccataggtatatttgtcatttattatttgcaatgtttaccctttaatcaaattgttgttaattaaatttttatgttaaatttaaatgttaaatttttcagtaaataaatggaaactaaaaaaaagttaacaactcaacaacgtttagatataataaaattttatcag

SEQ ID NO: 37961 - DNA, 260 bp, Unknown
  Description of Unknown: RightRegion for integrase A529 sequence
caaagtagccgcatattgccgagtgtccaccgaccaagaagagcagctatcaagttatgaaaaccaagttaattattaccgagagtttatctctaaacacgaggactatgagttagttgacatctatgcggatgagggcatctcagcaactaataccaaaaaacgtgatgcttttaaccgcttgatacaagattgtagggctggtaaggtggataggattttggtaaagtcgatcagtcgctttgcaagaaacacccttg

SEQ ID NO: 37962 - DNA, 260 bp, Unknown
  Description of Unknown: RightRegion for integrase A530 sequence
caaagtagccgcatattgtcgagtgtccaccgaccaagaagaacagctatcaagttatgaaaaccaagttaattattaccgagagtttatctctaaacacgaggactatgagttagttgacatctatgcggatgagggcatctcagcaaccaataccaaaaaacgtgatgcttttaaccgcttgatacaagattgtagggctggtaaggtggataggattttggtcaagtcaattagtcgatttgccagaaacacccttg

SEQ ID NO: 37963 - DNA, 260 bp, Unknown; identical to SEQ ID NO: 24961
  Description of Unknown: RightRegion for integrase A531 sequence

SEQ ID NO: 37964 - DNA, 260 bp, Unknown
  Description of Unknown: RightRegion for integrase A532 sequence
caatgtagccgcatattgccgagtgtccaccgatcaagacgaacagctatcaagttatgaaaaccaagttaattattaccgagattatatctccaaacacgaggactatgagttagttgacatctatgcggatgagggcatctcagcaaccaataccaaaaaacgtgatgcttttaaccggttgatacaagattgtagggctggtaaggtggataggattttggtcaagtcgatcagtcgatttgccagaaacacccttg

SEQ ID NO: 37965 - DNA, 260 bp, Unknown
  Description of Unknown: RightRegion for integrase A533 sequence
caaggtagccgcatattgtcgagtgtccaccgaccaagaagaacagctatcaagttatgaaaaccaagttaattattaccgagagtatatctccaaacacgaggactatgagttagttgacatctacgcggatgagggcatctcagcaaccaataccaaaaaacgtgatgcctttaaccgcttgatacaagattgtagggcaggtaaggtggataggattttggtcaagtcaatcagtcgatttgccagaaacacccttg

SEQ ID NO: 37966 - DNA, 260 bp, Unknown
  Description of Unknown: RightRegion for integrase A534 sequence
caaggtagccgcatattgtcgagtgtccacagaccaagaagaacagctatcaagttatgaaaaccaagttaattattaccgagagtttatctcaaaacacgaagattatgagttagttgacatctatgcggatgagggcatctcagcaaccaataccaaaaaacgtgatgcttttaatcgcttgatacaagattgtaaggctggtaaggtggataggattttggtcaagtcgatcagtcgctttgccagaaacacccttg

SEQ ID NO: 37967 - DNA, 260 bp, Unknown
  Description of Unknown: RightRegion for integrase A535 sequence
caaggtagccgcatattgtcgagtgtccaccgaccaagaagaacagctatcaagttatgaaaaccaagttaattattaccgagattatatctccaaacacgaggactatgagttagttgacatatatgcggatgagggcatctcagcaaccaataccaaaaaacgtgatgcttttaaccggttgatacaagattgtagggctggtaaggtggataggattttggtcaagtcgatcagtcgatttgccagaaacacccttg

SEQ ID NO: 37968 - DNA, 260 bp, Unknown
  Description of Unknown: RightRegion for integrase A536 sequence
caaagtagccgcatattgccgagtgtccaccgaccaagaagagcagctatcaagttatgaaaaccaagttaattattaccgagagtttatctctaaacacgaggactatgagttagttgacatctatgcggatgagggcatctcagcaaccaataccaaaaaacgcgatgcttttaatcgcttgatacaagattgtaaggctggtaaggtggataggattttggtcaagtcgatcagtcgctttgccagaaacacccttg

SEQ ID NO: 37969 - DNA, 260 bp, Unknown
  Description of Unknown: RightRegion for integrase A537 sequence
cagagtggccgcctattgtcgggtgtccaccgaccaagacgaacagctatcaagctatgagaaccaagtcaattactaccgtgactttatctcaaagcacgaagactatgagctagtggacatctatgcagacgaggggatttccgcaaccaacaccaaaaaacgtgatgcctttaaccgactgatacaagattgtagagatggtaaggtggataggattttggttaagtccatcagtcgatttgcgaggaataccttgg

SEQ ID NO: 37970 - DNA, 260 bp, Unknown
  Description of Unknown: RightRegion for integrase A538 sequence
caaggtagccgcatattgtcgagtgtccaccgaccaagaagaacagctatcaagttatgaaaaccaagttaattattaccgagattatatctccaaacacgaggactatgagttagttgacatctatgcggatgagggcatctcagcaaccaataccaaaaaacgtgatgcttttaaccggttgatacaagattgtagggctggtaaggtggataggattttggtcaagtcgatcagtcgatttgccagaaacacccttg

SEQ ID NO: 37971 - DNA, 260 bp, Unknown
  Description of Unknown: RightRegion for integrase A539 sequence
cagagtggccgcctattgtcgagtgtccaccgaccaagacgaacagctatcaagctatgagaaccaagtcaattactaccgtgactttatctcaaagcacgaagactatgagctagtggacatctatgcagacgaggggatttctgcaaccaacaccaaaaaacgtgatgctcttttacagaagacctacactgtggattttctcaccaagaaacgaacggaaaatgatgggcaggttaaccagttttatgttgccaaca

SEQ ID NO: 37972 - DNA, 260 bp, Unknown
  Description of Unknown: RightRegion for integrase A540 sequence
caatgtagccgcatattgccgagtgtccaccgaccaagacgaacagctatcaagttatgaaaaccaagttaattattaccgagattatatctccaaacacgaggactatgagttagttgacatctatgcggatgagggcatctcagcaactaataccaaaaaacgtgatgcttttaaccgcttgatacaagattgtagggctggtaaggtggataggattttggtcaagtcgatcagtcgatttgccagaaacacccttg

SEQ ID NO: 37973 - DNA, 260 bp, Unknown; identical to SEQ ID NO: 37429
  Description of Unknown: RightRegion for integrase A541 sequence

SEQ ID NO: 37974 - DNA, 260 bp, Unknown
  Description of Unknown: RightRegion for integrase A542 sequence
gtctttcctataaaaggtagaaaatatgaactgaaggttagaaaggagcacttcttatgaaaaacgtcataactattggagcaaatgcgcctaggaactcagagttagctagcatttcgctacctaagaaacgtcgtgtagcaggttatgcgagggtatcaactgatcatgaagaccaaacaaccagctatgaatctcaaatgaagtattatacagaatacatttcaagtcgaagcgattgggagtttgtcaaaatgtac

SEQ ID NO: 37975 - DNA, 260 bp, Unknown; identical to SEQ ID NO: 37429
  Description of Unknown: RightRegion for integrase A543 sequence

SEQ ID NO: 37976 - DNA, 260 bp, Unknown
  Description of Unknown: RightRegion for integrase A544 sequence
ataatgagatgacctaccaactaacaatgatacaagcaaagatacttttaaagaaaggatcaatcacaattgaggaatttgaactttttagacaattgatgcttgaaaaatatcaaccgtttataagtcaattatcgacctaataactggataattttttcttttagagtgatatatagtagcgaaaggagtgtattaatttgagaacagttagaagaatacaacccataaaatcgccctgcaagccaagatttaaggtt

SEQ ID NO: 37977 - DNA, 260 bp, Unknown
  Description of Unknown: RightRegion for integrase A545 sequence
tgggttataccagtaaaaggaaggaaatatcctatagaaattagagaggggcgatattagtgaagaaagtaattactattcaggctacaccaagtattattaggtcaagttcagatgatttctctttgaaaaagcgtagagttgcaggctatgccagggtatcaactgaccatgaagaccaagcaacaagctatgagtcacagatgcggtactactctgaatacattagtgggagggatgattgggaatttgttaaaatg

SEQ ID NO: 37978 - DNA, 260 bp, Unknown; identical to SEQ ID NO: 37977
  Description of Unknown: RightRegion for integrase A546 sequence

SEQ ID NO: 37979 - DNA, 260 bp, Unknown
  Description of Unknown: RightRegion for integrase A547 sequence
ccggatggcggcctactgccgagtgtccaccgaccaagacgaacagctatcaagctatgagaaccaggtccgttactaccaggactacattcggcagaatcctctctacgagttggttgatatctatgcggatgagggaatttcaggaacaaacaccaagaaacgcacggagtttaatcggttgataggtgactgccggaaaggaaaagtagatagaatcattgtgaaatccataagccatttttccagaaacacgctgg

SEQ ID NO: 37980 - DNA, 260 bp, Unknown
  Description of Unknown: RightRegion for integrase A548 sequence
ccccaggtgaagtcgcggctcgctcccctgtcgtcggccgagcgagtgatcatctcctgaacgcagaaaagccccgcactccacaagggagccggggctgtctgctacgcggcgagtccgagaaggactctcaccacgcgaacttgctcgggagtgggaggcggaggcgctggcctctgcctgtccagctcgatggcttcggcgagggtcactacggcgcgaccctcccgtgcttctggaagcaccgccaggtgatcggc

SEQ ID NO: 37981 - DNA, 260 bp, Unknown
  Description of Unknown: RightRegion for integrase A549 sequence
tttgtttacgggaatgaagaagagaggctcaaggagcttagaattctggagctcccttaacctcttcgtacagcaagaagaggcaaaccctttttatagttatgccccttcaagatttttagtggtgagaccatatggagcttgttgatgaaatcagatggttgagggaggctttgcaggacctcgaagacagggttattaattgggtgtcaagacccagggtttacacgagtctcagggaagcgtttgagcacactgca

SEQ ID NO: 37982 - DNA, 260 bp, Unknown
  Description of Unknown: RightRegion for integrase A550 sequence
ctctattttgacgacgacaacattcaaatactaacacttaagcgaggacaattgaaatgaagaaagtcattaccattgaacctgctagacctgttcaccaagtagaagaaacctcagtattcactaggcgaagagttgcaggctatgctagggtatcaacagaccatgaagaacaagcgacatcgtatgaagctcaaatgaagtactatacggattacattaacagtcgtattgattgggagttcgtcaaaatgtattca

SEQ ID NO: 37983 - DNA, 260 bp, Unknown
  Description of Unknown: RightRegion for integrase A551 sequence
cctaatgaagtaattccatcaaataatcactcgccacataaagagaaccccacatgttgagacggtagtattgctatcatgggtagacaagggatagagtagaaacatgtgtaaataagcgctttccgtgatttgagatctggctccaagctagaaagatagtcacggttttttattttatgggaacttatccaagaatggcagaatgtaaggttgagtggctatattgactttagagctcgtgagttgatgaaattgct

SEQ ID NO: 37984 - DNA, 260 bp, Unknown
  Description of Unknown: RightRegion for integrase A552 sequence
gctaaggtgacctatagaaatggaaaagaaaaacacgtcatcattcagaaaggacggtagacatgaaaaaagttatcacgatagaaccagctaaacaagtcacccatatggttgacctgcccagctttactaaacgacgagtggcaggttatgcaagggtatccactgaccatgaagaccagacaacttcatatgaagctcagatgacatactacacagactacatcaacagtcgctcggattgggaatttgtcaagatg

SEQ ID NO: 37985 - DNA, 260 bp, Unknown
  Description of Unknown: RightRegion for integrase A553 sequence
gctaaagctacctatagaaatggagaagaaaaacacatcatcattcagaaaggacggtagacatgaaaaaagtcatcacgatagaaccagctaaacaagtaagccataaggttgacctgccgagctttaccaaacgacgagtggcaggctatgccagagtatcaactgatcatgaagaccagacgacctcctacgaagctcagatgaaatactatacagactacatcaacaatcgctcggattgggaatttgtcaagatg

SEQ ID NO: 37986 - DNA, 260 bp, Unknown
  Description of Unknown: RightRegion for integrase A554 sequence
gctaaagcgacctatagaaatggagaagaaaaacacgtcatcattcagaaaggacggtagacatgaaaaaagttatcacgatagaaccagccaaacaggtcacccataaggttgacctgcccagctttaccaaacgacgagtggcaggctatgccagagtatccactgaccatgaagatcagacaacttcctacgaagctcagatgacatactatacagactacatcaacagtcgctcagattgggaatttgtcaagatg

SEQ ID NO: 37987 - DNA, 260 bp, Unknown
  Description of Unknown: RightRegion for integrase A555 sequence
tcaaacaaaggttcaagttttacaattttacaaaaaccaaaagtacaatcgtattcttaaaatcttttaaattgaataccattttatttagaaacttgtcttccaatttaattcggaaaacctttatgggctttcgcacaacattgattcatctatattaaataacaattggccttctgattctcattattctttcttgaaaaactcaagaaaaaccaaagaatgtattcgataagttagatttctttgtttaacctact

SEQ ID NO: 37988 - DNA, 260 bp, Unknown
  Description of Unknown: RightRegion for integrase A556 sequence
attagagaagacgatatccgtctgggtaaaataaaggaaactgaattatgtaccctgtagataaagaatccagaattcgtttaatggaagatctggacaaatggataaatgaacactacttagaaaaagtcaccgtcaaagacctaagtcaccaactaggtgtgttcatcccagatgtttaccgtctgtttgctgaacaacgcaacactaccccgggagagtacctccgacgtaaacgtttagttaaagccaaagctttg

SEQ ID NO: 37989 - DNA, 260 bp, Unknown
  Description of Unknown: RightRegion for integrase A557 sequence
caagctgaccaagaccatgtcttagttagactagaagtaaaacccaagacggttagagaagcgttcctgaacgcctataagcgagcgggaggcattcctgtagagtgggacaatcgtctcgctgtttaaaccagtatcctgcttgctcttcagcaagcaggattattgttgtttgttaaatattcattaaaggatttattatgtccatagatacactaggaatcgacgatgaaatcgttttgaccacaatagcgaacatt

SEQ ID NO: 37990 - DNA, 260 bp, Unknown
  Description of Unknown: RightRegion for integrase A558 sequence
agctgacaaagacaacatgttggtcagaatcgaagtgaaacctaaaacggttactgaagctttcttacaagcttatcgtcgagctggatttgaaactgttccctgggaaggtcgcatggcttcctaatctcattccctacttgcttaacggcaagtagggttatttttacaaactcaatataaatcattaaggattaattatgtccatcgagttgcctatcgctgaagatccaatcacagcattaacttttaagaacata

SEQ ID NO: 37991 - DNA, 260 bp, Unknown
  Description of Unknown: RightRegion for integrase A559 sequence
gattttgttgtacttgatcctagttggaaatcggaagacattcacgaagtttttaaataagaaagaggtaaattatgcgttttaaagattttaatcttgaagttgttaatgttgaacgttactcatcagattatagcatgacggtgaacaagaactttgttacatttagtaaaggaattgtccaagctttagaatacccagcacatgtactggttgcctttaataaggatacaaaggtaatgggtatacaagtttgtcgt

SEQ ID NO: 37992 - DNA, 260 bp, Unknown
  Description of Unknown: RightRegion for integrase A560 sequence
gattttgttgtacttgatcctagttggaagtcggaagacatccacgaagtttttaaataagaaagaggtaaattatgcgttttaaagattttaatcttgaagttgttaatgttgaacgttactcatccgattatagtatgacggtgaacaagaactttgttacttttagtaaaggaattgtccaagctttagaatatccagcacatgtactggttgcctttaataaggatacaaaggtaatgggtatacaagtttgtcgt

SEQ ID NO: 37993 - DNA, 260 bp, Unknown
  Description of Unknown: RightRegion for integrase A561 sequence
tatcgacctaataactggataattttttcttttagagtgatatatagtagcgaaaggagtgtattaatttgagaacagttagaagaatacaacccataaaatcgccctgcaagccaagatttaaggttgcggcctatgcaagggtttctgatagtcgtcttcatcattcactgtcaacacagattagctactataaccgtttgatacaagcgcatcctgattgggaattggtagggatttattatgatgaaggcataagc

SEQ ID NO: 37994 - DNA, 260 bp, Unknown
  Description of Unknown: RightRegion for integrase A562 sequence
gcatcatcatgttcatgtaggacgttaggggaaaagcgacttttggcatcgtttaaaagcaagttaggcattgtcccagataaagagtgggttgaaaataatattaaacacatcgagtatgactttggttaccgtatcctcagggtaactccagtaaaaggaaggaaatatcttatagaaattagagagggtcgatattagtgaagaaagtaattactattcaggctacaccaagtattattaggtcaagttcagatgat

SEQ ID NO: 37995 - DNA, 260 bp, Unknown
  Description of Unknown: RightRegion for integrase A563 sequence
ggcttttttgtaattaaacctcgaaaggatggaaacaatgagtatcttagacaactttgatgtggttggtgttcctcgtacattcagtattgcagaggttcgaatcctgaagaaccgcatctcctttaaccttgcaacagcttccgagattggctatccgccgtttgtgcggctgtttatcagcagagacaaaacgcagattgcgttgcagccttgtgccaaagaaacgccgaacgcgatgaagttctttacatcggatt

SEQ ID NO: 37996 - DNA, 260 bp, Unknown
  Description of Unknown: RightRegion for integrase A564 sequence
ttacagaggaagagtttatagctaagaaaaaaataattttagggatttaaggtgtaaagttaaccgttaaaaaataaaaaagccccacgctctcaaactttggcgagtctgagcgtgaggcgaattctagtatagtaaaaacctgctttaagtaggtctctttactgtactcattttaacaaaaaatgaggtaaaaaacaatgagaaaagtagctatttactctagagtatcaacaataaatcaagccgaagaaggatat

SEQ ID NO: 37997 - DNA, 260 bp, Unknown
  Description of Unknown: RightRegion for integrase A565 sequence
cgcaagttcaaggccgtcactggccagacgcccaacaaataccaagcaaattacgactaaagggttgcatattgcgatgccatagcttactatctctccatattgataggagaaaccacatgggcatcaagacagtcatatcagacaacctaaagagaatcatggccgagcacgacctatccagtaacgagctggctaaccgctctgggctcccacagaagaccctctattcgatgatccacggcacccacaacagccgc

SEQ ID NO: 37998 - DNA, 260 bp, Unknown
  Description of Unknown: RightRegion for integrase A566 sequence
atatggttccaaaatagacgttgtaaagacagaaagttattttttgaaaaaaataattagacataatttagtgttttgaattgtacaattaatttaattgcacaattcaaattcataaactattaatttccattgaaaattaattacaattttttatgaatcaatgtatatccataaaagattatatcatacagcaccattatcattaatgaaagtatattcagttgaatgtttagtccatttcactgtcgttgaatttg

SEQ ID NO: 37999 - DNA, 60 bp, Unknown
  Description of Unknown: RightRegion for integrase A567 sequence
agagacatagtttctagaaaaaatggaattttaatggggttgaaatgtgccggattttag

SEQ ID NO: 38000 - DNA, 260 bp, Unknown
  Description of Unknown: RightRegion for integrase A568 sequence
agagtgaagaaagaagaatatgaagctattttagttaagattcaatctttagttaagtaaacataatatttcataaggtcatctcttattagaaaataagaggtgactttttatgtctagaaaagaaataatagaaaattttattaaacaatcaaagaagcaattatctttaaaagaaatatcagagggaacaggcgttcctaattctacagttcataagatagtgaaggaattagggtatcaatgtgtaagacatcaag

SEQ ID NO: 38001 - DNA, 260 bp, Unknown
  Description of Unknown: RightRegion for integrase A569 sequence
aaacaccccctgcatcatccactctccatctacgactcattctgcagaggagtggcgtgatgatggaactgcaacatcaacgactgatggtgctcgccgggcagttgcaactggaaagccttataagcgcagcgcctgcgctgtcacaacaggcagtagaccaggaatggagttatatggacttcctggagcatctgcttcatgaagaaaaactggcacgtcatcaacgtaaacaggcgatgtatacccgaatggcagcc

SEQ ID NO: 38002 - DNA, 260 bp, Unknown
  Description of Unknown: RightRegion for integrase A570 sequence
tatgagccgttaagaagaagtgaacgaataaaaaatatggaagaaaaattgaataattaaatattctaaaaaatttatcgttaaagtagtgttatatacaatgtccgcaacattacttagtttaatttcgaaaatagaaaatccatcagattctctatcagcaattattgggttatctactcttggtggaattgttggtgtttattgtagtggtataacagaaaaagatgataaagaggtaaaaaacgaatcaattccta

SEQ ID NO: 38003 - DNA, 260 bp, Unknown
  Description of Unknown: RightRegion for integrase A571 sequence
cagatagacaaattagagtcctactgcaaaattaaggactggacggtttacaaagtatacactgatggaggtttttcaggatctaatactgaaagaccagcgctagagaaccttattaaagacgctgacaagaaaaatttgatacagttctagtttataagctagaccgcctcagccgtagtcagaaagatacactattcttgattgaggatgtattcatcaagaatgggattgaatttctgagcttgcaagagaatttt

SEQ ID NO: 38004 - DNA, 158 bp, Unknown
  Description of Unknown: RightRegion for integrase A572 sequence
ccatgggaagtgaaatttatatacgacggattgtaatattaagtgcaacacctataaaaattcataaaaaatgcccataattggcactttgttgtaagatgttaataaccaaaaaaacacatacaaggagtgccaacatgagctataaccatcttaca

SEQ ID NO: 38005 - DNA, 260 bp, Unknown
  Description of Unknown: RightRegion for integrase A573 sequence
ttaaatgaattggtttaacaacaaagtctataagactaataatagatccgtcagataacttgtaatgcgtgtctctaatatcgccaacaagttgtacaatttctaaagttgaatttgtttctggatgacggattgtaatattaagtgcaacacctataaaaattcataaaaaatgcccataattggcactttgttgtaagatgttaataaccacaaaaacacatacaaggagtgccaacatgagctataaccatcttaca

SEQ ID NO: 38006 - DNA, 260 bp, Unknown
  Description of Unknown: RightRegion for integrase A574 sequence
tttggatgcagtccgcaggcaatgcgcaacattctcaacaaacaccgggagtccgcatgaacgttatcatccacgatcaagattttcttgactacccgatcatggtagtcgacaccgagcttctggagaacacgctggaccctgagaccacggcgttcgagcgcgcgcaggaggcgctggcgcgcaaggaggtggtgctactcgtcaagcccgagcacataggacgcgtgttgtccaaagtccacaaacatgtgacagcc

SEQ ID NO: 38007 - DNA, 260 bp, Unknown
  Description of Unknown: RightRegion for integrase A575 sequence
ggagaagatggaaaagctcgaagaaagagtaaaaagtatagttcgaagatactaaaatgataggagaaaatatatgagagataaatattctaagtctaatattaataatgtttcgggaaatatttttaatggaccaaccaatattgcggcaggtaataattattataaggaagctgaagaagataaggttgcatcatatacaccagaacctgtttggagaagtccgataacaatggcaatgctttcatggatgggattta

SEQ ID NO: 38008 - DNA, 260 bp, Unknown
  Description of Unknown: RightRegion for integrase A576 sequence
aatcattatcagaaaggagcaaagcatggcgaaaaagattgtcaccatagaagcagttaagcctgtttgtcatcaagtagattttttaaggaaaagaaaagtggcaggatatgccagagtttccacagaccatgatgaccaagcaagctcttatgaagcacaaatgtgttattatgaaaactacattcaaagtcgtcatgattgggagtttgtgaagatgtattcggatgaggggataagtggaacgaatacgaagaaac

SEQ ID NO: 38009 - DNA, 260 bp, Unknown
  Description of Unknown: RightRegion for integrase A577 sequence
cactataatacagtcttcagatgtctgaagagaaataatcttacaaagatctgttcttagcttgctcgcgccacgcgtggtttcttggtaaatagcgccaaaacaccattcacggcgaatcggctactttgatgtttatgagaaacgtcgatatatatcgcatatcgacgttttcccctggctatagtgtcgtcgtttttgccaagagactgactccggacgacttctttctgttcaaacatattgtcgtttgtgagcat

SEQ ID NO: 38010 - DNA, 260 bp, Unknown
  Description of Unknown: RightRegion for integrase A578 sequence
caagttgattggttcgaaaatgaaagtgacagaggcgcatatggaagcacaggagagtaaagacgtattagaagagattaaaagaatacttcgcaaagagtaaggagtagataaagtgaatattaaaaaagcgagaaaaaaaccagtagaaattgagtttatgcaatttaataatatagacaatgcgtatgatatttcacaatgggcagtaggaaaaattaaatataaggtatcacgtaagtttaatataggttatatgt

SEQ ID NO: 38011 - DNA, 260 bp, Unknown
  Description of Unknown: RightRegion for integrase A579 sequence
gcgggttcgataccgaaaaatgcgttagatgaaaggaaacgcgaccgctttgaaagttagagattcttttaagtttagaataaactaataaattgctatgattccgattttctatttcaacaaatcattttcgatgaatggggatatacactatgatttcatacaaagaattaaaacacaatataacgcccgtaagttttaacgaaatcgacttcgatattttggaacaacacctgaatattagaatcgatgattttacg

SEQ ID NO: 38012 - DNA, 260 bp, Unknown
  Description of Unknown: RightRegion for integrase A580 sequence
ctttggattccgataactaaagctaaaaaaataccagttaatctatctgataccttttaacgatatctcgataggacttaaaggcgaaatcgcggttcgcttcctgcaaggaactgaggtagatttatagagtaaagaaaggctgtgacgacagtgggaacccactgtggttacagccttttttgcgtttttgtggtagaatcaaattgtagaacaatttggaggtcataagatattagtcgactttatgattcgattga

SEQ ID NO: 38013 - DNA, 260 bp, Unknown
  Description of Unknown: RightRegion for integrase A581 sequence
caacaagagaaagcaagaagaagtttacacaacaagaaaaaggaggggcgtcatgactaaaaagattattacgatagaacctgcaaaaatcttacgatcatcagaactacccagtctaaagaaacggaaagttgcaggttatgcaagggtatcaaccgaccgtgatgaccaagcgtcttcatacgaatcacagatgaaatactatactgattatatcggtagccgttctgattgggaatttgtcaaaatgtattctgatg

SEQ ID NO: 38014 - DNA, 260 bp, Unknown
  Description of Unknown: RightRegion for integrase A582 sequence
ttgtggactggtatatggcaatcattaaagctgcacaaaataaaggctatgtatggcgatctaaaaaatggttttcaggtaaaaagcaaacgttcttctgtcatgattgtgggaataacttttctgcttaaaattatgaacttaacaaaaaataaaaaaagtcctccaagttttgttcgaggaggaggacttaatcacaaatgtatagcaagacacacaaaagatgtgatgttttactatgctcaattttaacacagaat

SEQ ID NO: 38015 - DNA, 260 bp, Unknown
  Description of Unknown: RightRegion for integrase A583 sequence
aaggccgacgccgagcccggggccggagtcggcgaccgcatgcacttccactgggcctaggggcagtagttcgtggtcttcgtcgacacgccctgctccgcgagcgcacttgcgatcgcggggtagtcggagtggtagtcggcgaacacgtaggacgtcccgtccgtcaggacctggaaaccaggatcgatgtagccctcgctgcaggcgcgtgccctgagagttgctgactctgaccagtccgacgagagcgaaaacga

SEQ ID NO: 38016 - DNA, 260 bp, Unknown
  Description of Unknown: RightRegion for integrase A584 sequence
aaggccgacgccgagcccggggccggagtcggcgaccgcatgcacttccactgggcctaggggcagtagttcgtggtcttcgtcgacacgccctgctcctcgagcgcacttgcgatcgcggggtagtcggagtggtagtcggcgaacacgtaggacgtcccgtccgtcaggacctggaaaccaggatcgatgtagccctcgctgcaggcgcgtgccctgagagttgctgactctgaccagtccgacgagagcgaaaacga

SEQ ID NO: 38017 - DNA, 260 bp, Unknown
  Description of Unknown: RightRegion for integrase A585 sequence
aaggctgacgcggaacccggggcgggcgtcggcgatcgcatgcatttccactgggcctagggggcgggtgcccagcgttgcccgccgtagccgtcggccgcgatgcatcgcatcggcgtgcctgaggcgtcctcgctgcgctcgccgacggccgggcacggccccgacaggaccactgggtcctgggtgggctcctcggtgtacgtaggcgccggctcggtgttcacttccagcgttggcatcagcccggtgcagttgaa

SEQ ID NO: 38018 - DNA, 260 bp, Unknown
  Description of Unknown: RightRegion for integrase A586 sequence
aaggccgacgccgagcccggggccggagtcggcgaccgcatgcacttccactgggcctaggggcagtagttcgtggtcttcgtcgacacgccctgctcctcgagcgcacttgcgatcgcggggtagtcggagtggtagtcggcgaacacgtaggacgtcccgtccgtcaggacctggaaaccgggatcgatgtagccctcgctgcaggcgcgtgccctgagagttgctgactctgaccagtccgacgagagcgaaaacga

SEQ ID NO: 38019 - DNA, 260 bp, Unknown
  Description of Unknown: RightRegion for integrase A587 sequence
aaagccgacgccgaacctaaggccggagtcggtgaccgcatgcacttccactgggcctaggggcagtagttcgtggtcttcgtcgacacgccctgctccttgagcgcacttgcgatcgcggggtagtcggagtggtagtcggcgaacacgtaggacgtcccgtccgtcaggacctggaaaccgggatcgatgtagccctcgctgcaggcgcgtgccctgagagttgctgactctgaccagtccgacgagagcgaaaacga

SEQ ID NO: 38020 - DNA, 260 bp, Unknown
  Description of Unknown: RightRegion for integrase A588 sequence
aaagccgacgccgaacccggagccggcgtcggcgaccggatgcacttccactgggcctaggggcagtagttcgtggtcttcgtcgacacgccctgctcctcgagcgcgctggcgatcgccgggtagtcggagtggtagtcggcgaacacgtacgaggtcccgtccgtcaggacctggaagccgggatcgatgtagccctcgctgcaggcgcgtgccctgagggttgctgactctgaccagtccgacgagagcgaaaacga

SEQ ID NO: 38021 - DNA, 260 bp, Unknown
  Description of Unknown: RightRegion for integrase A589 sequence
aaggccgacgccgagcccggggccggagtcggcgaccgcatgcacttccactgggcctagggacagtagttcgtggtcttcgtcgacacgccctgctcctcgagcgcacttgcgatcgcggggtagtcggagtggtagtcggcgaacacgtaggacgtcccgtccgtcaggacctggaaaccaggatcgatgtagccctcgctgcaggcgcgtgccctgagagttgctgactctgaccagtccgacgagagcgaaaacga

SEQ ID NO: 38022 - DNA, 260 bp, Unknown
  Description of Unknown: RightRegion for integrase A590 sequence
agtcaaaataacgcacgtcacgcaagcagtcagaataacacaaaccacctacatcaaacctcaaatcacagaatattcaaaacccacaaaaattaccatcgcacctatatcaccaccatcatcagtaggcctatacaaaatttcatacagaaaaaattgataataaacacatataataacaaaaatatatattaatccatatgacaaaccacaccaaatacacaacaaatccaattgacacaatatatgtctacacaagg

SEQ ID NO: 38023 - DNA, 260 bp, Unknown
  Description of Unknown: RightRegion for integrase A591 sequence
ttttaagcgtaatagtagcattaatttctagcccatttatagtttcgtttttaagtaagttatttaatataaagaattaaaaaaatcccacgctctcaaagtttggcgactctgagcatgggatcagaaaggatagtaaagaacctattttgtaggtctttttactatacccattttaacaaaaagtgaggtattagacaatgaataaagtagcaatttatgttagagtttcaactactaatcaagctgacgagggatac

SEQ ID NO: 38024 - DNA, 260 bp, Unknown
  Description of Unknown: RightRegion for integrase A592 sequence
cattcacgcgccaaagtcaggggatatttgggccgaaacatttacgggaattaaacttgaggacagtccatttgtcgaaaaagacaaagccaaacttgctaaaacccttgaaaaactagacgcggaaattcacgcgcacctagtgaatattaatcactggtctgtcactgagggcaatgaggaaggggaagacaaaaccaatggcaaaaaataaacaaacagccattgcttattaccgtgtcagcacggcaaagcagggc

SEQ ID NO: 38025 - DNA, 260 bp, Unknown
  Description of Unknown: RightRegion for integrase A593 sequence
atcaagcaagatggattagactataagaagaaaaataaatatacgacaataagtgcttaagggggatgattaatgttagttactgtatttcacgcgtctttacacaagatcgataagtttgaaatcccataccaaggattgcattttggttctttcgagtcagcacttcaagcagtagagaggaagtgtgagcaaaatggtaccgatgagttctacctacacagagtgttactagatatcactacttgcgaggatgtttt

SEQ ID NO: 38026 - DNA, 260 bp, Unknown
  Description of Unknown: RightRegion for integrase A594 sequence
ctcaacgagtcgactttgtatgactggatcaaccgccagaaagccaagggaaatctatgagtcgccgcaaggaggagtagttggaccgctgccaatccggcccatactgcgtggccgccacccccgacggcgcggccctcaccaccaagatcatatgccagaggtgcctcacaagactccaggaacaatacgacgagctccccaccatccggagagttctggagatgttcaaagggggattgtggggccagtccggcgaa

SEQ ID NO: 38027 - DNA, 260 bp, Unknown
  Description of Unknown: RightRegion for integrase A595 sequence
ctgaatgaatccactctctacgactggatcaaccgccagaagaaaaagggaaacctatgagcatctacttcgagatccccgaagggcaaatgatcgaaggcgtattcgaggtggggcccggcgccaacatccgggaattagcccccggtaagtatgcgatcctccccgacctcaacgccccctcggggggctggaccccattcaacgccgacggcgagattgactccgaacgcctcgcggccgagggctgggcggtcctc

SEQ ID NO: 38028 - DNA, 260 bp, Unknown
  Description of Unknown: RightRegion for integrase A596 sequence
ctcaacgagtcgactttgtatgactggatcaaccgccagaaagccaagggaaatctatgagcatctccatgcgtgctgtgaccgccgatggaatccttgaaaaagatgacaaggccgtcgagcccgaggtgttcaccttccctggcggggagcaccacctccgcaacatccctgatcatccgaatatcaaggcctgggtggcgtgtgtgcgggggagtgaccccaacgacttggtgaaggccggtctgctatccgatgtc

SEQ ID NO: 38029 - DNA, 260 bp, Unknown
  Description of Unknown: RightRegion for integrase A597 sequence
ctgaatgaatccactctctacgactggatcaaccgccagaagaaaaagggaaacctatgagcatctacttcgagatccccgaagggcaaatgatcgaaggcgtattcgaggtggggtccggcgccaacatccgggaattagcccccggtaagtatgcgatcctccccgaccccaacgcccccgcggggggctggaccccattcaacgccgacggcgagattgactccgaacgcctcgcggccgagggctgggcggtcctc

SEQ ID NO: 38030 - DNA, 260 bp, Unknown
  Description of Unknown: RightRegion for integrase A598 sequence
ctgaatgaatccactctttacgactggatcaaccgccagaagaaaaagggaaacctatgagcatctacttcgagatccccgagggcaaatgatcgaaggcgtattcgaggtggggcccggcgccaacatccgggaattagcccccggtaagtatgcgatcctccccgaccccaacgcccccgcggggggctggaccccattcaacgccgacggcgagattgactccgaacgcctcgcggccgagggctgggcggtcctcg

SEQ ID NO: 38031 - DNA, 260 bp, Unknown
  Description of Unknown: RightRegion for integrase A599 sequence
ctgaatgaatccactctttacgactggatcaaccgccagaaagcaaagggaaacctatgagcatctacttcgagatccccgaggggcaaatgatcgaaggcgtattcgaggtggggcccggtgccaacatccgggaattagcccccggtaagtatgcgatcctccccgaccccaacgcccccgcggggggctggaccccattcaacgccgacggcgagattgactccgaacgcctcgcggccgagggctgggcggtcccc

SEQ ID NO: 38032 - DNA, 260 bp, Unknown
  Description of Unknown: RightRegion for integrase A600 sequence
ctcaacgagtcgactttgtatgactggatcaaccgccagaaagccaagggaaatctatgagtcgccgcaagggggattagttggaccgctgccaatccggcccatactgcgtggccgccacccccgacggcgcggccctcaccaccaagatcatatgccagagatgcctcacaagactccaggaacaatacgacgagctccccaccatccggagagttctggagatgttcaaggggggattgtggggccagtccggcgaa

SEQ ID NO: 38033 - DNA, 260 bp, Unknown
  Description of Unknown: RightRegion for integrase A601 sequence
tgaaaaagttttttactggggtgatagaaaaatcactcaagcgactgctgaaaaacgttgtgggtatttcaaggggtaatgcttatgactactataactctcaaaacttttacattttacgctattaataataagtctttttataaattgttggatagcttgctatcaagtaatcagttgagagcaggcagtggattacaatgaaagtagctatatatgttagagtaagcactaccttgcaagctgaaattggctattcc

SEQ ID NO: 38034 - DNA, 260 bp, Unknown
  Description of Unknown: RightRegion for integrase A602 sequence
tcagaatcgatgaaaggaagaaagagtatagaggagagaataaagagccgttcggaataaacggctctttattctcaatcgatatagagaaactgtgagaacgtgaataaagagccgctcggaataaacggctctttattctcaatcgatatagagaaacgatgagaacgtgaataaacggctctttattcttaatcaatagaacaaaactataagagcagcgatcaaatctcagtctgagtaaaagggtcgctaattct

SEQ ID NO: 38035 - DNA, 260 bp, Unknown
  Description of Unknown: RightRegion for integrase A603 sequence
accaagatccaaaagatacatcaattaagtttgatgacaatccaataagaaattcagaaagagtgaatattgattttagttccgatagtgaacaataattaaaaaattgaattttgaatttatatagtggtccaattattattggaccatcagtattcctttatcgactataattgttcgttgtgtaaggaaattaatttatgaataacactaattattcaaaaaatgctggcacggcattagatgctggtatggcatta

SEQ ID NO: 38036 - DNA, 260 bp, Unknown
  Description of Unknown: RightRegion for integrase A604 sequence
aaatacaatggtttcggtcttattgcagaagtattttcacgatggtgtgaatggtcctaaaaaattgaatcagggtgaactcgaaaaatattttatagaggataatcatgaagctattatttccatggaggttggccaaacagtcaagacaaactagcagcaaaaaggtagaaacaaaacctataaatttacggggttattaaagtgtcagcattgtggttcgactttaaagagacaagtttcttacaagaaaaaaattg

SEQ ID NO: 38037 - DNA, 260 bp, Unknown
  Description of Unknown: RightRegion for integrase A605 sequence
tcggcatgtaaggcaagatgggcaacaattaaatatgattacccttacatcatgtattaaaaactttttataaaatttgtttacacttttgattatgtatgttataatttatatatattataaaggagtggttttatgggtacaaaattattggtttatgaattagaagatttacaagaagaaccatttggttttgaagttgaaaatctaacacctcgtgattggagagagatttcttcttatgttgaattatctgaaga

SEQ ID NO: 38038 - DNA, 60 bp, Unknown
  Description of Unknown: RightRegion for integrase A606 sequence
atatcagaaagtggacagattactgtcgcctttctggaaggaacagaagtcgacctgtag

SEQ ID NO: 38039 - DNA, 260 bp, Unknown
  Description of Unknown: RightRegion for integrase A607 sequence
ttaaaaaacgaaaatacaaaggatctttactacttcaaaaatactttcatgatggtgtaaacggtccaaaaagattaaatcaaggacaggttgaacaatactatatcgaagataatcatgaaggaattgtatctaaggaaatatgggagaaggttcaggtaaaaataaaaagccgttctcggatccaaggtacaaataaaacctataaattttccagaatgttaaaatgccaatattgtggttcaacattaaaaagacaa

SEQ ID NO: 38040 - DNA, 260 bp, Unknown
  Description of Unknown: RightRegion for integrase A608 sequence
ctgaatgaatccactctctacgactggatcaaccgccagaaagcaaagggaaacctatgagcgcggagatattaaaagaagcccgggacatcgtcgccaaagggtggataaaaggcgactacacagacgatcaggggaactactgcgcactgggcgcgctaggggaagcggttatgcgcaatggccttttcccctatgttgtctgggagaccaggacgaggctccaggaccacttgccagatctcgggtggaagggacgg

SEQ ID NO: 38041 - DNA, 260 bp, Unknown; identical to SEQ ID NO: 38030
  Description of Unknown: RightRegion for integrase A609 sequence

SEQ ID NO: 38042 - DNA, 260 bp, Unknown
  Description of Unknown: RightRegion for integrase A610 sequence
ctcaacgagtcgactttgtatgactggatcaaccgccagaaagccaagggaaatctatgagtcgccgcaagggggattagttggaccgctgccaatccggcccatactgcgtggccgccacccccgacggcgcagccctcaccgccaagatcatatgccagagatgcctcacaagactccaggaacaatacgacgagctccccaccatccggagagttctggagatgttcaaggggggattgtggggccagtccggcgaa

SEQ ID NO: 38043 - DNA, 260 bp, Unknown
  Description of Unknown: RightRegion for integrase A611 sequence
cacggtgcgcccgccgacaccgcccgacccgacgtggaggattcctgtgcaaccgcatgacccccgaacccgacagagcatcgagcgctcgaccttcgcgcgcacgctgcgccagttcgtggcccggcagaccctgctgctggccaacaacgtgaccctgctggccgagatccgcgacgacatcgcggccggcgccgaggcggtgccgcgcatcaatctggcgatggccaagctgcacgagcgcatgcgcgcactcagcg

SEQ ID NO: 38044 - DNA, 260 bp, Unknown
  Description of Unknown: RightRegion for integrase A612 sequence
ctgaatgaatccactctctacgactggatcaaccgccagaaagcaaagggaaacctatgagcgcggagatattaaaagaagcccgggacatcgtcgccaaagggtggataaaaggcgactacacagacgatcaggggaactactgcgcactgggcgcgctaggggaagcggttatgcgcaatggccttttcccctatgttgtctgggagaccaggacgaggctccaggaccacttgccagatctcgggtggaaggggcgg

SEQ ID NO: 38045 - DNA, 260 bp, Unknown
  Description of Unknown: RightRegion for integrase A613 sequence
tttagaggaaaggaatggaatacttcgagagtaaaatatgtctccaaatcatctgtataattatattttttataaacataatacctcatatatgttttgcaaaaattttctaaattttataaacataatacctcatatatgttttgcaaaaattttctaaattttatagatcgctgttgaaacctcttgcaactaggaaatcgttttgatctttcttcatacacaaacaaccagcattttgccatccgttgtcacacata

SEQ ID NO: 38046 - DNA, 260 bp, Unknown
  Description of Unknown: RightRegion for integrase A614 sequence
gggaccatccatgcgtgggccactccgctgtcggccgccagctccgtgagggcggtgaacgacagggagaacgcgaggccgccaacgaacacggtgcctgcggtagccagcttgacgggagagagcatcggagcctttcgggggatgtgatgttcgaggagtagaacatcacttttaccaaactccggtatccttgtcatatgcgagttctgggaagattgcgtttgtcgaggtcaacggaggaatccacctccatcgag

SEQ ID NO: 38047 - DNA, 260 bp, Unknown
  Description of Unknown: RightRegion for integrase A615 sequence
aagccttggaatggtaggtcattagcgaccttctcgaaaaggaatggtattgaattgtaaaggagaaagaataatggatattaaactagaagattatttaacggaaggagaaatcaaagataccttacgtcaagcattacgtgacaagtgtgaaaactatgtagttcataacttcgagcgtatgatctcgaattcagcctaccattgtgtctggcaaagtgtagatgaagtcattgatggaacattcaagcagcaacttg

SEQ ID NO: 38048 - DNA, 260 bp, Unknown
  Description of Unknown: RightRegion for integrase A616 sequence
gaagtctatggagttaatattgttgagctccgggaaactttgagaggtgttcgtgtctgataagaaatcgaaagaactcaagaagctcaaaagtgccgccaagaaatattgtttggaacctaatgcctcggaattagtgttaaagaaaaccctgttttctttacctaaagtcattaaaatgttccgtgatgcaggtgagggaagtttgtatgattacatcactcatttaaaaatgctggaggcgaagaaactcttagatg

SEQ ID NO: 38049 - DNA, 260 bp, Unknown
  Description of Unknown: RightRegion for integrase A617 sequence
gttggttcggattatgaatacgacatcagaagacacttaatggctaactacggactgactcctgcggagatccgtaaacataaaggtccacttactcgtcgtaacaaaaccaagcagtttgttcgctttgttaaaactaacgccgacttatgtattagagaagacgatatccgtctgggtaaaataaaggaaactgaattatgtaccctgtagataaagaatccagaattcgtttaatggaagatctggacaaatggata

SEQ ID NO: 38050 - DNA, 260 bp, Unknown
  Description of Unknown: RightRegion for integrase A618 sequence
taagaggagctataatattcgttaagaacattgtatagtcatttttaatttcgacaatgttacgttcgtaaaaatgtgtcatcgttatataatcatccatgagagatttacaaattgaatttaaacgtaatagtgggggaaaaaaattgatattaatattcgtacaggtggattgttttgatgattaggagtataaatatatgagtcaattaggggcaatttattgtagaaaaagtagtgttgggaaatatgcgattaag

SEQ ID NO: 38051 - DNA, 260 bp, Unknown
  Description of Unknown: RightRegion for integrase A619 sequence
tctaagcttatcaagaagcatggtatcccttacaaaaagaaatcacgttggaataaataactacaggagtgatctatgtaccagaacataaataaaaatttcccagagatcacagaatcttttgaggtattgatgtcctacccaatcggtaagatcttcacctcagacacaccctctgggaaggagaagaaacttgagcagaggtgtactaaactggtagacagttattactctattgagagtatccgtcatcagcgtat

SEQ ID NO: 38052 - DNA, 260 bp, Unknown
  Description of Unknown: RightRegion for integrase A620 sequence
caatattataattgcacgccacgtgaatatgcaaaacatcagttattatctggaaaataagatgcatttatctcccagataatattgtaatattaaactcagtcagcatttagtagcagagcattatctatgatgatctgctcccattcttcgaatgcccgatcgcggacgccctggggaacactgttagttttgaaatcgacgaccgtacgccatttcccgtccggacggtacatgcgcagagctttacttcccccttc

SEQ ID NO: 38053 - DNA, 260 bp, Unknown
  Description of Unknown: RightRegion for integrase A621 sequence
cattacgtaaacaacaacgtgaagagttacaagagttgattgccaagaagcagaaggaagctaagtcagaaaaatctgttgaagagttacaagcagaactgttggcattagaggctggaaaataattaaaataaaacgttgacaccgatccccgatgtgctatgattcgtttatagcaaatacatcggggattttttattatgactatatatgcatataaaaggtgttcaacaaatgaagacaagcaagatactgctcgt

SEQ ID NO: 38054 - DNA, 260 bp, Unknown
  Description of Unknown: RightRegion for integrase A622 sequence
aaaggaaataaattttacccaatacaagtaagcaacttaatcaaattatatgaaaactaatatgaaagttaatatagagaatttaatcgataagagtcctagggagttgaacatccttaagaaagagtatttagataacatggatttcgtaagcgcttgcgaggtaaagagcttcgctaggcattgtacaaaaataaaaatgttggtgaaaagggggggtcaagaacaataaaataaaagggttatctttgtagtgtaac

SEQ ID NO: 38055 - DNA, 260 bp, Unknown
  Description of Unknown: RightRegion for integrase A623 sequence
aatagaaaaaaaatatccgacaagtttttagatacacgtaaaaacgcgattaaacaataattttttgtagggtttaaccctatatattaataatataatttcgtgaaattccatgaaaacccgtgaaattccatgaaacattttattataaactttataaactttataaagtctattaatcactactaaataatattaaagtctattaatcactactaaataatattaaagtctattaatcactactaaataatattaaa

SEQ ID NO: 38056 - DNA, 260 bp, Unknown
  Description of Unknown: RightRegion for integrase A624 sequence
tttaaacaacactaccgtacgcatcctcaatcgtacgcgaatgcattcaagagaaaatgaatatgactgaccacgaattagcactacaaatccaagactacgttaaagaaatctatatgaaacctcgtccatctaacttggtttacactaagttcaatatgagtggacctgtcatgggacgtttcttggaacgattaaatcatccttcaatcaaagtaatgttggtggaagcccgtatggagcgagcgaaagaactccta

SEQ ID NO: 38057 - DNA, 260 bp, Unknown
  Description of Unknown: RightRegion for integrase A625 sequence
gtatggaacgtattttcagcgtagcgaccagtggcaagcgcagttcgttctgtacttcttttaaacgtcatttcggcttgaccccgacagaagctcgcaaacatccagaacgtgtaatgcgtttaaaggacaccgagcaattcaaaaagtacatcgaagtcggagtcaaaaacatagaactacattaaaggtttattaccatgcaacaatcgttcagagaacaattatttcaagacaccttaaaatgggtcgataaaaac

SEQ ID NO: 38058 - DNA, 260 bp, Unknown
  Description of Unknown: RightRegion for integrase A626 sequence
ttttaacttactgtacactttgtcatctaatcttactacaaatgccttcattacaatcctttcattctctgcctaaatgcactctttctgggaaggaaaaaacgtgaaataaaaaaagtacatttaggtattgtaataatatcaaaaatatataatatgtatactaggcaatgttgcctattacaaaggagaaaagataaatgtggaaaataggagcaataagattgagtgacagtgcagcagaaaaagctaggcagatg

SEQ ID NO: 38059 - DNA, 260 bp, Unknown
  Description of Unknown: RightRegion for integrase A627 sequence
aaacgttttacggtaggtcctaaacactatcgtcaactaaaattaatcaaggctatataactggggtgtaatactatgtgggtaatgactagctgaccatctaaatgaagaattgaacaatcttggtgtataccgcaattgacgacataatttggaatctatcctcggcacccacatcaccctttcactaattgggtgtacaaaacgggtataaagcgcaaggccgtcattttacgatgacggcacttattatgttggaa

SEQ ID NO: 38060 - DNA, 260 bp, Unknown
  Description of Unknown: RightRegion for integrase A628 sequence
ttcaagtatggcaaattacattttaaaagagtcagaggaaaagttcagtgtaagtactgatagtgagcagttctacttggtcacagcactgattaacaccgttgctggcctaaaagaagaagatcaaccatcatatcgcaatattcaaaacattatccagcagataataacggaaaatctctatctagatggcactgtatgtgccttggttagctatggtcgggatcgaaatactaacaggaaaacctacgtcgtccatg

SEQ ID NO: 38061 - DNA, 260 bp, Unknown
  Description of Unknown: RightRegion for integrase A629 sequence
aaggtttgggatggtaaatccttagctgttttcgcaaaacgaaatgaaattaaattgtaaaggagaggtggacagatgacacattcacttagagaaggattatcaagaagtttgcaagacctaggatcacttgtagatgttaaagtattgtcagaggtacacagtccgatcctatatgtagaaattatagtattaagtacattgcaagatgatacgattgctagtattattgctaaacatctaccaattgttactcagac

SEQ ID NO: 38062 - DNA, 260 bp, Unknown
  Description of Unknown: RightRegion for integrase A630 sequence
ttttgaactaatattattatctctttggttcaacaccaaagtattggatagtattaagaggcaatggacatttgagaatgtcgctatggtttatattataagctgggtaattttcctagctggaaattattaaaataaatattgacattataaacccagtaaccttatattaagtcactgggtttttatatggagttaccatgaaagtagtattatacaggcgtttgagtaaagaagataaaaccaaaaaccaacatggt

SEQ ID NO: 38063 - DNA, 260 bp, Unknown
  Description of Unknown: RightRegion for integrase A631 sequence
ttgaactaatattattatctctgtggttcaacaccaaagtattggatagtattaagaggcaatggacatttgagaatgtcactatggtttatattataggttgggtaattttcctagctggaaattattaaaataaatattgacattataaacccagtgacttaatataaggttactgggttttcttatatggagttaccatgaaagtagtattatacagacgtttgagtaaagaagataaaaccaaaaaccaacatggt

SEQ ID NO: 38064 - DNA, 260 bp, Unknown
  Description of Unknown: RightRegion for integrase A632 sequence
aagtttgaaaggaaatacggaatgggtccccgacgttatcaacaacacgcacgtctttaagttatttcctaactcaacgtacattatatgtgagcggtacaagattaggtttaactagactagcgtgtccgaaaagaaaaggtgtatgccgcgagtccgacctaggaagttatcccttcattacaaccgctcacaactcttttggttcagaggaagtcctccttgtcaacatcgatgtcactaaagccattctctgaacc

SEQ ID NO: 38065 - DNA, 260 bp, Unknown
  Description of Unknown: RightRegion for integrase A633 sequence
ttacggtaaaacctatcgtgaatggagaaaggatactaggatgaaattagctaaggagttactccacaaaaatccaagtattaagattacagacttggcgactactgtaggttcttgtagtgcgacctatttacggaagcaataccaagaagtctacggggttaatatcgttgaactccgggaaactttgagaggcgcttgtgtctgataagaattccagagagttcaagaagctcaaaaatgcggctaagaaatattgt

SEQ ID NO: 38066 - DNA, 260 bp, Unknown
  Description of Unknown: RightRegion for integrase A634 sequence
ttatggtaaaccctatcgtgaatggagaaaggatactaggatgaaattagctaaggagttactccacaaaaatccaagtattaaaatcactgacctggcgactaccgtaggttcttgtagtgctacttatttacgtaagcaatatcaggaagtctatggagttaacattgtcgaacttcgggaaactctgagaggcgttcgtgtttgataagaaatccagagaacttaagaagctcaaagacgcggctaagaaatattgc

SEQ ID NO: 38067 - DNA, 260 bp, Unknown
  Description of Unknown: RightRegion for integrase A635 sequence
aatcctcttagacattaagtttaagaggatttatttttatgaaacaatacaaaattcgacctagtttctttggcttattctacaaagttactttgtttgctgataattatgaccgacatactatatcttttcatttaactaggcagtctgcggaaaatcaggtaaagtggctgaagaaaattaattattaaggttttattatgaaagtgattatttacaaacgtctttccaaggaagaccgtactaaaacacaacacggt

SEQ ID NO: 38068 - DNA, 260 bp, Unknown
  Description of Unknown: RightRegion for integrase A636 sequence
accaataaatcaaaatatatatcacgcgcatcaacggatgcttttccaaagcatggaaaaatacaagacagtgttttgttactattattttgcatataaaatgacaaacaaaaaatatatttacataagagcgcaaaaaaattgaaccattaaattcttatcaatataaatattatatttattcgagaatcttatataatatggtggcacttaatgacgaatcaaaaaatggatatatttattgtagacaaagcaaaaag

SEQ ID NO: 38069 - DNA, 260 bp, Unknown
  Description of Unknown: RightRegion for integrase A637 sequence
ttcgtgcgccgcggggacatgtcctcgcggctcctgcagcaccacatggagatggtgcgcgctcgtctcccgccgtacgacctggaggggctggtggtgtgctgcaacgtcgacggcggcgagcgggcgttcgcgctctcgccgcataactgaaaagatatcatcggaacgtgaaatcgcggccagaggccggcgcacccatgacggcggcgctcatttactgccggatctccaccgaccgccagacgacgctgctggcc

SEQ ID NO: 38070 - DNA, 260 bp, Unknown
  Description of Unknown: RightRegion for integrase A638 sequence
attttgattttagtggtggtcaatgattaaaaaattaattttgattttagtggtggtcaatgattaaaaaattaattttgattttagtggtggtcaataattaaaaaattgattttttaattaacatagcagttcattttagttgaaccataagtattcctcaatcaatcgtaattattgttgtgttggaaattcaacttatgaataacatttatcattcaaatgatactgatatagtattagcggctgatgcattggtt

SEQ ID NO: 38071 - DNA, 260 bp, Unknown
  Description of Unknown: RightRegion for integrase A639 sequence
cgcgcggacatgtcgacgcgcctgctgcagcagcacatggaccggttgcgcgcccaccccccgccgtacgacctggaggggctggtggtctgctgcaacagcggcggcggcgagaaggcgttcgcgatctcgccgcataactgaaaagatatcatcggaacctgaaatcgcggccagaggccggcgcacgccgcttccccatgacggcggcgctcatctactgccggatttccaccgaccgccagaccacgctgctggcc

SEQ ID NO: 38072 - DNA, 260 bp, Unknown
  Description of Unknown: RightRegion for integrase A640 sequence
tgtgatcgcaactcgaatcataaagattcgtccgacaaaatcacagaaacaacagattgacaagattgcaggagttgttcgattttgctataacgcatcgatcaatgaaataaacaaaatgcgttgtcatgaaatttcatggccatccgggaaactcgatcaacatctgagaaacaaattttcgatcgggaaacacaatgatatcgaacaatacatttcgattcatggaaataacatcgaacccgaacagatcatcgaga

SEQ ID NO: 38073 - DNA, 260 bp, Unknown
  Description of Unknown: RightRegion for integrase A641 sequence
tccgctcgtggtaaggtgttgagtcaaggtatgatcagtaaactcttaaaagaaatttagataaaattgaaaaaattattatcaggactacctagaggaaaacttagaacaagttctaaaatcgtatctgggatctgcttacgaaaattagtgcaaattacataatttattatccgagtaccaattacgattttcgtttttacgataagaatcaacaacttatactagttcaataatttatttatgagatttcgtttcca

SEQ ID NO: 38074 - DNA, 260 bp, Unknown
  Description of Unknown: RightRegion for integrase A642 sequence
aaatttcgtctctttaatttttcttcttttttcttcttctttttctgtctcctattaaggatttttttagaagacattctatatatgtataatatatattttttttttattttttatatttttttataagtaaaaataaaaatcatcaaaaaatataaaaaataatatatataaaactatattatatataccattctataatgaaaaaaaagaataataaaaacgctgataacgaggtaaataaaaagaaagaagtaggt

SEQ ID NO: 38075 - DNA, 260 bp, Unknown
  Description of Unknown: RightRegion for integrase A643 sequence
tgaacgaagcaaaaagaatgatgcttgttagttttattagaaacaaatggaaaaagagatacagacagtggataatttgtaaaagaatgcatcggtatgttgatcctgactgctccaaaattatcgcaggctatttgtaaataaaaaaattgataaatacattaacgaaacaataataatcaatacatagaaacaaactaatgaaagcatatatctattgtcgattgagtggacgtcgaggatcggttaattctcaaacc

SEQ ID NO: 38076 - DNA, 260 bp, Unknown
  Description of Unknown: RightRegion for integrase A644 sequence
ttgagttggtgcaataataaataattcatgttttcacttttatgatttttagcatggtgttgatcgctttgggcccgcgataaaccaaaccatacaaaatcgactcgtgggatgaagccgcagaatcgaagtgactttcgagctggttgcgtttaaatgctccattcttgtttgtccaaaatcgacctcaaatcgaccccatgtgtctcactatcatccacctccacatttcaatatggactctatcatcgagctgggat

SEQ ID NO: 38077 - DNA, 260 bp, Unknown
  Description of Unknown: RightRegion for integrase A645 sequence
tcagctcgtggtaaggcgttaagtcaaggtatgatcagtaaactgttaaaggagttgtagtaagctcttgaaggaaatttaaataaactgacggatttattatcagagttactttcaagaaaaattaggacgaattctaaaaatggtatatgaggtttgtttatggaaattagtgcaagttgtcggatttattatccaagtaacaaagcactttttcgttttcctgataagaatcaactacttagacgaacgatgatttt

SEQ ID NO: 38078 - DNA, 260 bp, Unknown
  Description of Unknown: RightRegion for integrase A646 sequence
tcggctcgtggtaaggtgttgagtcaaggtatgatcagtaaactcttaaaagagttgtagtaaactgttgaaagaaatttagctaaactgttaagattattatggaggtggtatgcaagtagtacagtatagtataaaacaatgtggcatagacaagttgacatgcagtaacaaagataccaaattcatggataaaggtttttacggaaaactgacaccgctttgtacacttaataacggaaaccaagatggtattctgt

SEQ ID NO: 38079 - DNA, 260 bp, Unknown
  Description of Unknown: RightRegion for integrase A647 sequence
tcagctcgtggtaaggtgttgagtcaaggtatgatcagtaaattactcaaggaaatttaggtaaaccgttaaaattattatcaagattacttccaagaaaaattagtgcaaattgaaaaaattacatatgagatttgtttatggaaattccagtgcaaattacgtaatttatttgagcgatccctttcgccaaatggaaaaattatttctgagattacgtttccaaaatttgtagagaattctaaaattatttatcagaa

SEQ ID NO: 38080 - DNA, 260 bp, Unknown
  Description of Unknown: RightRegion for integrase A648 sequence
tgccgagtatcacgagcgatgcgaggcatacgatcggctcgtctgtaccggcccgatcattcacggctcgatcatgccggcgacggctcacgagctgcgccttatcggccgcaatgcgcgcgccgtattgcgcgagctggccgagcgcgcggcaatgctcggctattcatcaaggcaactcacgaaggcgatacaagaaaatgcgtgatccactcgacaagggcacactcgatatcgtcaccggcggcatgcgcatcggc

SEQ ID NO: 38081 - DNA, 260 bp, Unknown
  Description of Unknown: RightRegion for integrase A649 sequence
caaatatggttccaaaataaacgttgtaaagacagaaaaaatttggaaaaaaataattagacatgatttggtattttaaattgtacaattaatttaattgtgcaatttaattctaatcttttatgagtatgtaattacatactcataaaaagattattatcatacagcatcattatcattaatgaaagtatattcagttgaatgtttagtccatttcattgtcgttgaatttgaataaacaatagtcgttttttcatgtt

SEQ ID NO: 38082 - DNA, 260 bp, Unknown
  Description of Unknown: RightRegion for integrase A650 sequence
ggtggtaaatgggatgctaaaactgtttctcgtttgtgtgccagactgaacattaaataggagaggatatgaaacaagaaaatgaatctgtagatcacttaatcatgctgtcagccctttttgccggatgggacgtattttttgaaaatttgttcaattcttctacagatggttccgattttatgcgccagtttaaacgacgaactgttgaggactatgctttctattcaggtcggattgaaaaaggttacgaagataca

SEQ ID NO: 38083 - DNA, 260 bp, Unknown
  Description of Unknown: RightRegion for integrase A651 sequence
gtgcatagagaaaccgtaggagcaataaagcgaggaatatcgtggaaacacgttaaataaaattatatattactaggaggaaaacatattatgtcattcgcagatttaatcaaacaagcaaaagcagaggtagaacaacaaacaggcggggataacagccgtacagtttacccgaaagctaagcacccgacattattctttggtaaagatacaccggaattactatttcaactattaccttcagctgacttaaacagcac

SEQ ID NO: 38084 - DNA, 260 bp, Unknown
  Description of Unknown: RightRegion for integrase A652 sequence
tggtatccttctactgtaaggaattatgtaaatagatgttcttctaatgttcatctgtaatagaaacaatatgtgtctaaaagataaactatacaaggtcatttagacaccaattaaaaaggagtaaagatgatacagttgattaaaaagtataaagagcaaattaagtttgctgccgagtgcataacatttcttttaatgttagttgcaatgtattttttcactatagttatgtgtgcgttgtcagataagtgtgctgc

SEQ ID NO: 38085 - DNA, 260 bp, Unknown
  Description of Unknown: RightRegion for integrase A653 sequence
tggtatccttctactgtaaggaattatgtaaatagatgttctgttaatgttcatctgtaatagaaacaatatgtgtctaaaagataaactatacaaggtcatttagacaccaattaaaaaggagtaaagatgatacagttgattaaaaagtataaagagcaaattaagtttgctgccgagtgcataacatttcttttgatgttagttgcaatgtattttttcactatagttatgtgtgcgttgtcagataagtgtgctgc

SEQ ID NO: 38086 - DNA, 260 bp, Unknown
  Description of Unknown: RightRegion for integrase A654 sequence
atgtttatgcggaatccgaagaacacgcaaaagctattggttccgtgcttctttctagaatagcaggtgaagaaattcctgtagaggctatctttgcagaagttgaccctagtattcaagaggatgatattaccactacttaactgttgactttaacattaaggtagtgcatacttcctgtaacagaacaggagggtattatgaagtttgtactatatcatcgactttctaagaagaaacaacaaggcaaccagtatggt

SEQ ID NO: 38087 - DNA, 260 bp, Unknown
  Description of Unknown: RightRegion for integrase A655 sequence
atgtttatgcggaatccgaagaacacgcaaaagctattggttcagtgcttctttctagaatagcaggtgaagaaattcctgtagaggctatctttgcagaagttgaccctggtattcaagaagatgatattaccactacttaactgttgactttaacatcgaggtagtgcatacttcctgtaacagaacaggagggtattatgaagtttgtactgtatcatcgactttctaagaagaaacaacaaggcaaccagtatggt

SEQ ID NO: 38088 - DNA, 260 bp, Unknown
  Description of Unknown: RightRegion for integrase A656 sequence
tgctatttatacccaatatatggtaaaatataaaagagaattaacttttgttatatctaactagttagaataatataacataatatcatataatttaccaaaaaatattgaaaatgtggacaaggagtgataaactataaataaaaacattgacaaacatagacaatagtggtaatatgtatacataaggagttgaaattatgaatacatataaaccaaaagattttgcagaaatgataggagtatcagtaaaaacacta

SEQ ID NO: 38089 - DNA, 260 bp, Unknown
  Description of Unknown: RightRegion for integrase A657 sequence
ctgttgttgcgattgaaaaagacaaacttgtgggcgtttatcattcagcctgcgaggctggcagaagaaatggaatatgtgtacagaatatagttagctgttgttccggaaagcgtaaacatgctggtgggtatcaatggttttgggaaaacgataatacttggtgtgatttagttaacatggagaaataaatatatattatgatttacggatacattagagtaagtagtgataaacaaactgtagaaaaccaacgtttc

SEQ ID NO: 38090 - DNA, 260 bp, Unknown
  Description of Unknown: RightRegion for integrase A658 sequence
ctcttagatgaaatgcaagaagtaataactaacaatgtcagctatctcaatcacgcataaaatcgctttaaagcctaataacaagcatactacctactttaaaaaagcttttgggtgtgctaggttcgcttataattgggggttagctaaatggaaagaaaactaccaactaggtattaaaactagccatctacaacttaaaaaagagtttaacgctcttaaaaaatcgcaatttaatttcgtttatgaagtaactaaat

SEQ ID NO: 38091 - DNA, 260 bp, Unknown
  Description of Unknown: RightRegion for integrase A659 sequence
ctcttagatgaaatgcaagaagtaataactaacaatgtcagctatctcaatcacgcataaaatagctttaaagcctaacaacaagcatatcacttattttaaaaaagcttttgggtgcgctaggttagcttataattggggattagccaaatggaaagaaaactatcaactaggcattagaactaaccatctacagcttaaaaaagaatttaacgctcttaaaaaatcgcaatttaatttcgtttatgaagtaactaaat

SEQ ID NO: 38092 - DNA, 260 bp, Unknown
  Description of Unknown: RightRegion for integrase A660 sequence
tataaggacagatcttggtaccctacaacagttaaaaatgtccttgaaaggggttgctaatgaacagaatatggactaaatatataaacaagatgaacataaaagaaacattattgtttatagcagagggtgtagctttcttgttatgcttggctgctatctattttattgtcatgtttggatgcgtgatggttgatagttgttactattactatgttccaggagggggatcttgatgggagatagtggtagaaaaacat

SEQ ID NO: 38093 - DNA, 260 bp, Unknown
  Description of Unknown: RightRegion for integrase A661 sequence
ctgcacgagcaccagcgcggccacgtcgtcgacatcgaggagggcgcgctcgatgcgtagcccggaggacgtgcaccgcgagctattgcagtcgcgaggtctcgttccgctgacgctgttcgacccgcacaacctcgatgactgctacgagcccaccggtctcgacgagtttcaccccaacaccacgaggaacccctgatgctgcccgattgcgcgctgtgcggctgcccgcaccacgtaggccaatgcgcctgcacctg

SEQ ID NO: 38094 - DNA, 260 bp, Unknown
  Description of Unknown: RightRegion for integrase A662 sequence
ccttgttttttacaaaaacacgtaatgtaactcgcgccatacacaaatgtcagacagaaccagacaaacagacagaaacagaaggctaggaactgttcaacaaatccctgaggatacctgagggtttcttaagagacctgagtttttacggacaatttgatgctcgtaaaaattacataattttaatacttcgtagcactatggatggttacatctccggctcaaaagtcaaagaactcctcaacgtcagcgactggacg

SEQ ID NO: 38095 - DNA, 66 bp, Unknown
  Description of Unknown: RightRegion for integrase A663 sequence
aatacaattagctatatggcaggctatattgttaatgatgggataaagcaagaagcataagactaa

SEQ ID NO: 38096 - DNA, 260 bp, Unknown
  Description of Unknown: RightRegion for integrase A664 sequence
agtcgcaaaaataagaaacttttagataacgtagctaaagctgtgcaagaatcttcctaaatatgttgacatggggtagatttgggtatatatttaagaagtcaccaaaacattgtgaggtcgaaacagtgctgctttcctttaaaacaagtctaatcccaaataaaaaacaggtaactgcttttcgtaaagcctctggtgttgctagacacgcctataactgggctaacgctcaaatacaagatgctctagctaataaa

SEQ ID NO: 38097 - DNA, 260 bp, Unknown
  Description of Unknown: RightRegion for integrase A665 sequence
aaagatgctgaagaaagtattcaaaaaagcaaaagaagaaatataaatagatataaatagctataaatagatataaagaaaggagtttagaatgttatctagaaagataagaattgatagctttatctctgataaagaaaaagaagaaatttatcaatattctaaatctctttctactatctataatgaatgtctagatctccttaaagagaatttgaattttaaagatctatctaaaatcacaaaaggtagatcgaaag

SEQ ID NO: 38098 - DNA, 260 bp, Unknown
  Description of Unknown: RightRegion for integrase A666 sequence
atctctagagatgtagatattcctagtagtactctacatgatttacttaagaatctctaagtagagtccccaccataagtaagacactatttctaaagttttaattattaatttttctctttgttgaaactctatttagaggataactattaactatttacagttgttctctctagagtttagcgctatttttaggagggaagtttttgtcttaaactcaagacagactccaccccgaggaacagctaacgacctcacga

SEQ ID NO: 38099 - DNA, 260 bp, Unknown
  Description of Unknown: RightRegion for integrase A667 sequence
ttgtgattggtatataaaaaaatatttttctgaaccgggacaaataaattttaaggcaatattttcaaaacatgatgtaaaatgttctaaatgtgaacatatagaacatgttgatggtatttttgaaggtattttatatgaagatataaaaaaaattgcggaaattaatgaaaagaaaaaatcaaggcgaaataataaatatgattaatttaaattttcttggaggaaaacaaactgcgaaattacttggtgttcatcaa

SEQ ID NO: 38100 - DNA, 260 bp, Unknown
  Description of Unknown: RightRegion for integrase A668 sequence
agaagtcacaaaaacaagaaaattatagaggagttgaaagaagttgctgttcggctttaaaactgagttaaaaatcaataaccatcagcgtacccaactacttcaacattgtggtgttgctcgtcatgcttggaattggggattagctcttaccaaacagatattagatcacaataagttaaatcctaattccaaaataaaatttcctactgctattgatttacataaatggttagtagcattagtaaaaagtgaaaatc

SEQ ID NO: 38101 - DNA, 260 bp, Unknown; identical to SEQ ID NO: 38100
  Description of Unknown: RightRegion for integrase A669 sequence

SEQ ID NO: 38102 - DNA, 260 bp, Unknown
  Description of Unknown: RightRegion for integrase A670 sequence
agaagtcacaaaaacaagaaaattatagaggagttgaaagaagttgctgatcggctttaaaactgagttaaaaatcaataaccatcagcgtacccaactacttcaacattgtggtgttgctcgtcatgcttggaattggggattagctcttaccaaacagatattagatcacaataagttaaatcctaattccaaaataaaatttcctactgctattgatttacataaatggttagtagcattagtaaaaagtgaaaatc

SEQ ID NO: 38103 - DNA, 60 bp, Unknown
  Description of Unknown: RightRegion for integrase A671 sequence
agattgtgtaacatgagtcgtacaactatatataagtatattaaattgttagaggactag

SEQ ID NO: 38104 - DNA, 260 bp, Unknown
  Description of Unknown: RightRegion for integrase A672 sequence
aatgtttttactgcaaagatgaatggactaagaaaatataaaaaatctaaatatttataaaaagcttatgttaatgttatttttataaagaaatataaattttttattaactagttgtttcccatatcatttttatattatcattaatttataaatatttcaatattttataaattatctaatttattttaattatgaaaattgagatagttaagaatataatatgtcatattgcaggaattgacaaagaattacatcaa

SEQ ID NO: 38105 - DNA, 260 bp, Unknown
  Description of Unknown: RightRegion for integrase A673 sequence
ctgttgaaaaaactatccgagatattcttatggaacgggccaggggtaagtgacataacttatatcgagcatcttgccattaactggcaatatgtattaatgcttaagatcaaacttagttattatagggttaaatacagaaaccaaaaacctaactaatactattcaaaattactcatgacttatgctataatcgttctatgagtaagttgaccatatcagaagcggctaaattaaaaggtgtaagcgtatcgacatta

SEQ ID NO: 38106 - DNA, 260 bp, Unknown
  Description of Unknown: RightRegion for integrase A674 sequence
acgttgggggtttcgcgtgcgacgctgtaccggaccctcgccgaggacggcagcaagtgaccggcagccagttctgcgaccagttggttgccgagctgcgggcgcgtagctggcggatagggtgattggcatgggcgtcccaacacacgtgatggtgttttccagcggcaccgcatcgacgaagggtggcggttctagtcggttgcagttcgtcagtccgctacgccggttgaatggtggagagcgctggttcttgctgt

SEQ ID NO: 38107 - DNA, 260 bp, Unknown
  Description of Unknown: RightRegion for integrase A675 sequence
ttgagaaaatataaaacattaataaagaaagaaataatggataaacaacctaaaaaatgaccatataacagaatatatcaataattctttccgaaggtacgaaattatataactcgtttaagatcaataagaataagaaaatattaacatagcttcgcagttgggatattgcttatggttgtatttggaaaaccgaagcaataaaagagttaaatgaaatatagtattataaattatgttgttagtgttagactatgatg

SEQ ID NO: 38108 - DNA, 260 bp, Unknown
  Description of Unknown: RightRegion for integrase A676 sequence
aagaaaaataccgcatctcttttgagatgaagatatagtctacgctcatatgaaagtatgagaggtctactcgtgagagaaagactgctataggtgttgcgacttatagtgaataagaaaaatatatacaaatataaaaaaatattgacatatctctctaaaaagtgtaatatataattatactaaagggaggtgagtacatggaattaatgtccattggtaaatttgctaaacgtgtaggcgttaatgttgttactctg

SEQ ID NO: 38109 - DNA, 260 bp, Unknown
  Description of Unknown: RightRegion for integrase A677 sequence
gcgccggatgggacatggcgcgacgaggaatacatcaggagacgagagcgtgaacagtaatgctgcataccgtagccgatcttctcggggcgctgtccatcgtcatttttgtggccacgcttttcgcaatcgttagactgattgtgaaagctcgtgagggtcacaagtaagacgcttctttctcactcaggcgtaatagcctctatgcgcaaccatgactgtccccacggggcctttacacacacgcgcccacgatctga

SEQ ID NO: 38110 - DNA, 260 bp, Unknown
  Description of Unknown: RightRegion for integrase A678 sequence
gccgcctacatgcgcacgatcaccgatatcgcgcgaccgagggattctcgagcgacctgatgcgcaatcagacgatctgaccggaagaagcaagccccgcagtcgtttccaacgtgcggggcttttttagggcgccgatagggcgcagcagcatcactcagaaagaatccagcttaggctttcatggcggtctccggtgacggttgatcaggcgttcacacgatgaaccgccattgtacatcacgaccgccagtcagaga

SEQ ID NO: 38111 - DNA, 260 bp, Unknown
  Description of Unknown: RightRegion for integrase A679 sequence
acaacaggattgaaaaagcacaagcaagcattaatagatgaattaaccaataaaaaatgataatgctaacgcaatgcataattcgcaaaaaagaattccaattttcatgtcacattgaatttttagaattttttgaatttgcccctattttcgtttttttaaacgctcaaagctatttacaaataatgaacgataaatacgataataacagttgcaagacgtcaataatagatgcaacacaataatattttttacaacaa

SEQ ID NO: 38112 - DNA, 260 bp, Unknown
  Description of Unknown: RightRegion for integrase A680 sequence
cgtaagtacaaaaaaaaattaactgatacaattaaaaatggtaagaataatataaaataaatgatagtatctcgttatattgaatatataacgaaatataacagtttttggttgccgctctactataaactaaaaagtaaatatatcatgtattaaatcaatttgactagctataaataataaatagttattctatatgcaatataattaaacaataatttcatttgatattttgttatactaaaatcaaataatgataa

SEQ ID NO: 38113 - DNA, 260 bp, Unknown
  Description of Unknown: RightRegion for integrase A681 sequence
aatagacgtaaaagaaaactgcatattgttaataaagatcttgaattatttgatgaataaatacacttaaagatttgtttattatatatatttatataatgagctcttcagtaaaacttaaaaccattacatttaatataacagataagcatacacgaaaaatatttaatggaatgacaaaaatatcaaaaaacatatacaatacgactatttttaatattactatatttaacaaatataaacaaactatttttaaaaaa

SEQ ID NO: 38114 - DNA, 88 bp, Unknown
  Description of Unknown: RightRegion for integrase A682 sequence
agaatgacagggattagtaagagtacattacaaagagcaaagcgaaaacaagaagactaggtacttagtctttttttattgaaaggag

SEQ ID NO: 38115 - DNA, 260 bp, Unknown
  Description of Unknown: RightRegion for integrase A683 sequence
ttgcaaataatgaatgtatttacagcaaaaatgaatggaatgagaaaatataaatcataaacaacaaaattattttccaaaaacttcaaacgaattgtaaaaatttataattataaacttttataaatattttgtgtactagtatcaccccagtcgggtttgttcgcgataatattaataagttgtgccattaatttttttattaataatcaatttataccaaaaccaatgttagtgaatttaattcaattttaaatttt

SEQ ID NO: 38116 - DNA, 260 bp, Unknown
  Description of Unknown: RightRegion for integrase A684 sequence
caccccgcgaaacgaacgcatatagaaaacgacgatcgaatcaatcaaatcgatcggtaatacagatcgattatgtctcaataaccacactcaacccatgatgttttttaagatagtggcgaattgatgcaaaggaggtgagatgaaatcaattcgctgtaaaaactgcaacaaactgttatttaaggcggattcctttgatcacattgaaatcaggtgtccgcgttgcaaacgtcacatcataatgctgaatgcctgcg

SEQ ID NO: 38117 - DNA, 260 bp, Unknown
  Description of Unknown: RightRegion for integrase A685 sequence
ctgcacgagcaccagcgggggcacgtcgtcgacgtcgaggagggcgcgctcgatgcgtagcccggaggacgtgcaccgcgagctattgcagtcgcgaggtctcgttccgctgacgctgttcgacccgcacaacctcgatgactgctacgagcccaccggtctcgacgagtttcaccccaacaccacgaggaacccctgatgctgcccgattgcgcgctgtgcggctgcccgcaccacgtaggccaatgcgcctgcacctg

SEQ ID NO: 38118 - DNA, 260 bp, Unknown
  Description of Unknown: RightRegion for integrase A686 sequence
ttcccctcatcagcgacaaagaataaattgtgtcatcccttaaccaaccgggacaaatagcctgacatctccggcacaactgaaaataccactcacccattaaccacggagttaaacggatgagtgactatcatcacggcgtgcaggtgctggagattaacgacggcacccgcgtcatttccaccgtatccactgccattgtcggcatggtctgcacggccagcgatgcggatgcggaaaccttccccctcaataaacct

SEQ ID NO: 38119 - DNA, 260 bp, Unknown
  Description of Unknown: RightRegion for integrase A687 sequence
tgttccttccaatacttcgtgacgttatttaaacaacaattccgtacacatcctcaaacgtacgccaattcttttaagagtaagtagttatggatacccaagaaaccattttaaaaatcgaagccgcagtcaaagaactatttgcagaaagcaaagcctccgctaagatttacgcacggctcaatatgagtgggccaagcatgggacgtttcctagagaaacataaccacccatcggttaaggagatgttagtagaagct

SEQ ID NO: 38120 - DNA, 260 bp, Unknown
  Description of Unknown: RightRegion for integrase A688 sequence
cgatcaaagacaaggacctgcgcgacagaatcggcaacgccgtttcttttagccgtccgctcagggccatgaacaaggtgttcagcccggcacgctgaacgctgccctagcggatgctagggagggttcaaaaaggaccctctccgccatacgctagggcaacgtacaatccccggaaacaaacgtttccacgggggaatatgctgtacggctacgcccgggtctcgacgcaagaacaagagacccacgctcaaaccgac

SEQ ID NO: 38121 - DNA, 260 bp, Unknown
  Description of Unknown: RightRegion for integrase A689 sequence
gcaaaagacccggagcaaaaaagcttctggcagcggtacaccaatgtttttctgaagcagcttagggccatgagccagacggcaaggatggcctcctaacccgttgccctaagcacgggagggggttcaaaaaggaccctctccgccattgcttagggcaacccgtacaatccctgaaaacaacaatcttcagggggcctatgttgtacggttacgcccgtgtctcaacgcaagaacaagagacgcacgcacaaaccgac

SEQ ID NO: 38122 - DNA, 260 bp, Unknown
  Description of Unknown: RightRegion for integrase A690 sequence
agccgaagaggcgcgccgcatgggcatctacgagaacgtgaagaaggtttttcggaacctgcttagggccaagaaacagacggtccggatggcatcctgacccgtcgccctaagcacgggaggagttcgaaaaggaccctctccgccattgcttagggcagccagtacaatcccaagaaaaaacgttttcgaggggttgcatgctatacggctatgcccgggtctctacgcaggaacaagagacccacgcacaaaccgac

SEQ ID NO: 38123 - DNA, 260 bp, Unknown
  Description of Unknown: RightRegion for integrase A691 sequence
cgagtttatggattaagaaaatataagaaaaaggttggtgatgattttaaatgcaaataacctataaagttgaattaaaactaaataagactcaaaagcaacagattaattcttatatcggtgttagtcgttgggtttataataagtttcttgaaataaatagtaaaaactaccaagaaacgcatgattccaaatcctatatgagtgcttatactttttctacttggtttaataatcagtatttaaaggataatcctagt

SEQ ID NO: 38124 - DNA, 260 bp, Unknown
  Description of Unknown: RightRegion for integrase A692 sequence
cgttaccaccccgcaggagaatcaagcggaacaatagagaagagtcagaaaacaaaataaccgctaatctgaccattagcggtttttgtgttaaatcagaacagccctttaactgaactggccgcgctgttaagggatgatgtcaccttatctttgaagccggacagcatatcgctgaacgatgaggattgcaggcgctcccgcaaatcctcatcacagcgttcaagggtcagtgaaaattctatctttttcgccttacc

SEQ ID NO: 38125 - DNA, 260 bp, Unknown
  Description of Unknown: RightRegion for integrase A693 sequence
actttgtatcgtattatcaacgtaaccactgaggatcatcatggcaacgcttgtttttgatacccatgcttttgttaaaaaactgaccaccgcaggaatgccggaagctcaggcggaaatcctcgcgcaggaacaggccaatctgatagaaaaccgcttggctaccaaggttgatatcacgacgttggaaaaaaatattgagatgaaatttgaagcgaaaatagaaagcgttaaatccgacatcatcaaatgggttgccg

SEQ ID NO: 38126 - DNA, 260 bp, Unknown
  Description of Unknown: RightRegion for integrase A694 sequence
cactaaaacaaaccattgacgaatgataattaggatttttttgatattctctaatatcaaaccacgattcagtttcaatttcattataatgatcggataattttggtatccatttttcttttttcttttttttcatattattttatttatattattaaaactttatataaacatttataaatatataaaaaatataacaaatgagtaaatacgtttcaggtaaaaaagcaagtgaaatattaaaagtgcatcaaagaaca

SEQ ID NO: 38127 - DNA, 260 bp, Unknown
  Description of Unknown: RightRegion for integrase A695 sequence
tagttaaaaaagagctacctacgagcataattctagaaaaattgttctgacttcttactctagaggggacgaaggtttgtagtttgttatcacaactgtgatttcagaaaagaggctccatgcacttcagatcgaagccgttgttagcagtttcagataaaccgtaaagtttatattatttcgtcataaaatttcatacaatgctaagacctaaagaagtgtgccaaagactaggaatttcatacgcaacactcagagaa

SEQ ID NO: 38128 - DNA, 260 bp, Unknown
  Description of Unknown: RightRegion for integrase A696 sequence
tatggaaaggctaaggcgtgtgtccaacacgtaagttacatgcaccctctcttactaggggtgccgggggttaaggtaccctatggggtaccgatgtacccccatgggtgccggggtcagcccggcactttggacagccgtcgtcaacagtttccgataaaccgtgaagtttatatactttgtatgtaagtttaactacaatgctgaaacctaaggaagtgtgccaaaaactaggaatatcataccgcacactacagagc

SEQ ID NO: 38129 - DNA, 260 bp, Unknown
  Description of Unknown: RightRegion for integrase A697 sequence
ctgtataaaaaacaccccgcgaaacgagcgcatatagaaaacgacgatcgaatcaattaaatcgatcggtaatacagatcgattatgccccaataaccacactcaacccatgatgttttttaagatagtggcgaattgatgcaaaggaggtgagatgaaatcaattcgctgtaaaaactgcaacaaactgttatttaaggcggattcctttgatcacattgaaatcaggtgtccgcgttgcaaacgtcacatcataatgc

SEQ ID NO: 38130 - DNA, 260 bp, Unknown
  Description of Unknown: RightRegion for integrase A698 sequence
ttgtataaaaaacaccccgccaaacgaacgtgcatagaaagtaacgctcaaaccaattgaatcggtcggcaacacagattgattgtgccccaatagccacactcaacccacgatgtttttttcgatagtggcgaattgatgtaaaggaggtgagatgaaatcaattcgctgtaagacctcattttccaacatcacaaccaagtaacgctgctgcccgcaaaatgatctaacgcccatacgaccagggtgtcacctctgga

SEQ ID NO: 38131 - DNA, 260 bp, Unknown
  Description of Unknown: RightRegion for integrase A699 sequence
taaaacaaaatcagtaaagttttccaagaaagtgaaggataaacttaaaaatatacatattaacgtaacacaagaacaaatacatacactcaatggaattaaaatataataaattaaattaagccgcctgtctaggtggttttcttttgtatttagggtataatataaatatatattatgaataggggttgaattataaaatgagtgataaaagtaaaagaacatttaatcgttggacttcttcagaagaagaactactt

SEQ ID NO: 38132 - DNA, 260 bp, Unknown
  Description of Unknown: RightRegion for integrase A700 sequence
aataagcagccagaatggtataaaaattcaataatcgttattatttatttggtggagcttactcttagagctgcttttaagttgtttataaatgtaagtgctaattttcaaagattggataatcatacatttacaatatgtaattataaatgataatatgtaattgtcaattaccatcatttaattaaggagatttttatatgccacatcaaattttgacatccgaaaaaattgttcaggccggcgtgaacataatcgaa

SEQ ID NO: 38133 - DNA, 260 bp, Unknown
  Description of Unknown: RightRegion for integrase A701 sequence
gtttatgattaacagctaaactaggtttccaaagtaaatcagaaaccttttcacattcgtcattccaaaacttaccatttgtagttttggccattacattattactaatattatgaaattatcttatatttaagtaactttttgactattatattaattgaacatatttaaagatatgtttcgaaaatatatttatcagaatgcctaaatatgttcgtcgtaaagaagtactggaagtattaaaagttcattatcaaact

SEQ ID NO: 38134 - DNA, 260 bp, Unknown
  Description of Unknown: RightRegion for integrase A702 sequence
gtttatgattgacaattagattaggtttccaaagtaaatcagaaaccttttcacattcatcattccaaaacttaccatttgtagttttggccattacattattactaatctcataaaattatcatatatttaagtaactttttgactattatattaattgaacatatttaaagatatgtttagaaaatatctttatcagaatgcctaaatatgttcgccgtaaggaagtacttgaagtgttaaaagttcattaccaaact

SEQ ID NO: 38135 - DNA, 260 bp, Unknown
  Description of Unknown: RightRegion for integrase A703 sequence
aatgtctatgtagccaaaataaatggaaaaataagtggtaaattaaaagcgaaaaagtaattacattaacaataaaatatatgaaaatacatacattttcatatattttaacgaaccgtcaataaagcatagtcataaattatctgataattatagaatgatttaatgattattacgtacaaactactgaggaattatttactagaccaagaaaaatatcacattacagtgaaaaataattatttagtcatatcagttcc

SEQ ID NO: 38136 - DNA, 260 bp, Unknown
  Description of Unknown: RightRegion for integrase A704 sequence
attgcgcaaaatgaagaattatttaagatgttacaaaaagagaaagggactaatagctaatattagtcctttttttatataaattggttattatgtaaaaaattgacaataatgtggatgagttttttaactattttgttaatttattatataatacatgtatacgcaaaggggtaaaaactacgaacgtagtataaattaatgtagggggagtttcgtttgtctaaaagatggacagcagaagaagataaattgttagc

SEQ ID NO: 38137 - DNA, 260 bp, Unknown
  Description of Unknown: RightRegion for integrase A705 sequence
gtttatgattgacaattagattaggtttccaaagtaaatcagaaatcttttcacattcatcattccaaaacttaccatttgtagttttggccattacattattactaatctcataaaattatcatgtatttaagtaactttttgactattatattaattgaacatatttaaagatatgtttataaaatatctttatcagaatgcctaaatatgttcgccgtaaggaagtacttgaagtgttaaaagttcattaccaaact

SEQ ID NO: 38138 - DNA, 260 bp, Unknown
  Description of Unknown: RightRegion for integrase A706 sequence
aatgtatatgtagccaaaataaatggaaaaataagtggtaaattaaaagcaaaaaagtaattacattaataataaaatatatgaaaatacatacattttcatatattttaacgaaccgccggtaaaagatcaaaatgacatctatcaataaatttttggacaccatatctatgtaacatgtataatacagtatcgatatcaccaattcttacgaaacacaaaatacaatcacaattaatttcagcgccattgtctattag

SEQ ID NO: 38139 - DNA, 260 bp, Unknown
  Description of Unknown: RightRegion for integrase A707 sequence
gatgtaatgaatgtatttacagcgagaagaaatggatcgagaaaatacagtaacaaatagtgagtaatttctttatgaatttataggtaaatttataaagaaatataaagaaattagtaactagtagagttccctctgtttcatagtttataatactgttttcatgttttagttcatcgatagctgtagatccaaccatatctttttgataaagatctacaccgtttgcaatcaaatctttaaatatgtcgagacattca

SEQ ID NO: 38140 - DNA, 260 bp, Unknown
  Description of Unknown: RightRegion for integrase A708 sequence
gatgtaatgaatgtatttatagcgagaagaaatggactaaaaaaatacagtaacaaatagtaagtaatttctttatgaatttataggtaaatttataaggaaatataaagaaattagtaactagtagacttcccaatattcactaattgttttattacccagactcaataaatactgtaaaatttcgatgttttttgattcaacaataagtttatctaaatcgtaatcaatatcgtaattttctatcaagtacttgacta

SEQ ID NO: 38141 - DNA, 260 bp, Unknown; identical to SEQ ID NO: 38139
  Description of Unknown: RightRegion for integrase A709 sequence

SEQ ID NO: 38142 - DNA, 60 bp, Unknown
  Description of Unknown: RightRegion for integrase A710 sequence
aaaatgacagggattagtaagagtacattgcaaagagcaaagcgaaaacaagaagactag

SEQ ID NO: 38143 - DNA, 260 bp, Unknown
  Description of Unknown: RightRegion for integrase A711 sequence
caaataatgaatgtatatgttgcaaaaataaatggaagaagaaaatataaaaataaataaaaatatatataaatcatacatttacatatattttatgagtccgtaaattatattaaaaatttaagaccaagtacatttcgtaaaaataatccaatgtttgaatcattaatattttttgataggaataatcattttaaataatatcattctattttttcaatatagttccaataataaggaaacatatgtttatacagttt

SEQ ID NO: 38144 - DNA, 260 bp, Unknown
  Description of Unknown: RightRegion for integrase A712 sequence
gcccgcgagttcaacatcagccgggaaaccctctaccagtacctccgcacggacgactgacacatgccgcgtcgcttgatcctctcggccacggagcgggacaccctgcttgcgctgccggaaagccaggatgacctgatccgctactacaccttcaacgactccgacctgtcgctgatccgccagcgacgcggcgacgccaaccgcctcggcttcgccgtgcagctctgcctgctgcgctaccccggttacgcgctggg

SEQ ID NO: 38145 - DNA, 260 bp, Unknown
  Description of Unknown: RightRegion for integrase A713 sequence
gcctggtaagcagagtttttgaaatgtaaggcctttgaataagacaaaaggctgcctcatcgctaactttgcaacagtgccccctaacctgatgtcagatgccatgtgtaaattgcgtcaggataggattgaattttgaatttattgacatatctcgttgaaggtcatagagtcttccctgacattttgcagggaattccatgactggacagcgcattgggtatatcagggtcagcaccttcgaccagaacccggaacgg

SEQ ID NO: 38146 - DNA, 260 bp, Unknown
  Description of Unknown: RightRegion for integrase A714 sequence
tatgatgtggctgtttccacgctttataagaagtttccggcgtcatcatttcaatcctaaaccttggtttaagagaactcggtaccagcggtgaaaagatccccctgttgagcacggctaacacatggagtgcacgccagactttcaacggcgggatcaccggggcgctgacagggaacgccgataccgcaacgaaattgaaaacagccagaaacattaatggcgtcaggttcgatggttctggtgacattaatatcaat

SEQ ID NO: 38147 - DNA, 260 bp, Unknown
  Description of Unknown: RightRegion for integrase A715 sequence
tatgatgtggctgtttccacgctttataagaagtttccggcgtcgtcatttcaatcctaaaccttggtttaagagaactcggtaccagcggtgaaaagatccccctgttgagcacggctaacacatggagtgcgcgccagactttcaacggagggatcaccggggcactgacagggaacgccgacaccgcgacgaaattgaaaacagcacgcactattggcggtgtggcatttgatggtactgcgaatattaatttacct

SEQ ID NO: 38148 - DNA, 74 bp, Unknown
  Description of Unknown: RightRegion for integrase A716 sequence
ttaaatataagtagaccaactttagataagttaataaaagaacatgaagaaaaagagtagctttaaaactactc

SEQ ID NO: 38149 - DNA, 260 bp, Unknown
  Description of Unknown: RightRegion for integrase A717 sequence
tagtgtattttgaaagaaaaaaatttgagatctaaagatgaaagaacttatcaagatcaacaagcaaaccttttttcttcatcaaatagaaataagctacgagtattgttactagttaccaacctaatagttgtttattgaaaagcaaggatgtttatactataatatagtacatgaagttgagtcattgggctaaaaagatgggaataagttatagaagagcatggcaaatgtataaggatggcaagctaccaaatgcg

SEQ ID NO: 38150 - DNA, 260 bp, Unknown
  Description of Unknown: RightRegion for integrase A718 sequence
tgcaaacattacgggaagcgtcgctatgccaaaaaaagcgatgatatcccgaaaagttgagatattcccgaacgttaaagatgccatggtcctcaagagatggtgcggactgtatcgtcggatgtataatctcgcgattgaaaagatgctcgacacaggtcgctggcattggaagggacacaaagttcttacgacatatgacaacatcccaaagaacgaaaaagtccgtttactcccgacgaacatccgtaaggaagcat

SEQ ID NO: 38151 - DNA, 260 bp, Unknown
  Description of Unknown: RightRegion for integrase A719 sequence
tatgatgtggctgtttccacgctttataagaagtttccggcatcatcatttcaatcctaaaccttggtttaagagaactcggtaccagtggtgaaaagatccccctgttgagtacggctaacacatggagtgcgcgccagactttcaatggcgggatcaccggggcgctgatagggaacgccgacaccgcgacgaaattgaaaacagccataaacattaatggcgtcaggttcgatggttcggctgacattaatatcaat

SEQ ID NO: 38152 - DNA, 260 bp, Unknown
  Description of Unknown: RightRegion for integrase A720 sequence
tttccagcttcctctgagtggtcatgccataccatttttgcccgacgccaaataccgaactcgttaacggataatctccagctggttgatagtttcccttcggctgatacttttccggtaaaccaaggtttccgggaatgcagccataaccggataaatccgtaataatcccgtcattacagcaaacatgagggaaaacaatggcggtcatcggctatatccgcgtgtcaacaactgaccaaaacagcgatttacagcga

SEQ ID NO: 38153 - DNA, 260 bp, Unknown
  Description of Unknown: RightRegion for integrase A721 sequence
ctttaataggacattttcgtctattatctataaaaagatcatacgacagtgttttctttttccgtttatttgtgtgcatatcatttcctaaaagctatatattatatattctttaagtcattattatattttgataaaaaaatattataatattttttataaagaaatataaaaagatattaaaaaaaatacaataaaaaatgccaaagtacttaggagggaaacaaacaagtgaaattttaggagtacatcaaagaaca

SEQ ID NO: 38154 - DNA, 260 bp, Unknown
  Description of Unknown: RightRegion for integrase A722 sequence
cagctcagtattgcccgctccacggtttataaaattcttgaagacgaaagggcctcgtgatacgcctatttttataggttaatgtcatgataataatggtttcttagacgtcaggtggcacttttcggggaaatgtgcgcggaacccctatttgtttatttttctaaatacattcaaatatgtatccgctcatgagacaataaccctggtaaatgcttcaataatattgaaaaaggaagagtatgagtattcaacatttt

SEQ ID NO: 38155 - DNA, 260 bp, Unknown
  Description of Unknown: RightRegion for integrase A723 sequence
ggaactaccgcccagtgtgttgttagtattcacgccgaaggaagatgtctgtggcagggttaacttcccgctcatctcatcgccagttttctggactgcgcccgcagcttgctttgctgtttcgcctaaaccgaggtttatgaaaatgcagaaaacggtcgtaaatggcatgatcccagccttttgcgagggggcctgttgtgcaaattggctatgtacgggtgtcaacaaatgaccagaatactgatttacagcgaaac

SEQ ID NO: 38156 - DNA, 260 bp, Unknown
  Description of Unknown: RightRegion for integrase A724 sequence
gaattgggagtaagtagaccaacattagatagattaataaagagccatgagagtaactaagaagagcaatatatatgcttaagttaattttagtggggcaaattcatagaattatgccctttaattatgtctgaaataattataaataactgtttttaagtataggggggtatccttctattttgaaaaaagtattttttatggaaaatgagttctggaaattttctagcaaaatttaaaaaccagagatacatcttgaa

SEQ ID NO: 38157 - DNA, 260 bp, Unknown
  Description of Unknown: RightRegion for integrase A725 sequence
ttgaacttggtaaatctgcacaaagacatgcatttaataaaccttcgttattacatgcaacatgatatttttcgtataaatattgtaatattttcaatgattcataacatgttttatgcgaaaatccagatgctatatgtccatgttcagaccattttttatataaaactatataaaaaaatgagaatataaattgtattatgcgatcaaaagatgttttaaaaattttaaatgtaacaagagttactcttacaacttat

SEQ ID NO: 38158 - DNA, 260 bp, Unknown
  Description of Unknown: RightRegion for integrase A726 sequence
taaaacaatattatgatgacaatggtgttgtagcaattacaggaattttatctaaagaagaaaatgcgcgacaatatcttcccgaaccatcaccaaatggtaaatatatttttacaaaaaataaatatgattcaatatatcatcatccgaccatttttttatataaaactatataaaaaaatgagaatataaattgtattatgcgatcaaaagatgttctaaaaattttaaatgtaacaagagttactcttacaacttat

SEQ ID NO: 38159 - DNA, 260 bp, Unknown
  Description of Unknown: RightRegion for integrase A727 sequence
ctttttgatgttagcatttccactctttacaagaaattccctgtaaatcagtcgcgttgaaagtggcgatattgtaccagtactgacacatcgtgaaatacgtgcgccgcacgcctggcaaccagaacataaggtatccctgtcaaccggagagactgccttatggctcaggattaccaccacggggtgcgcgttgttgaaatcaacgagggcacccgacctattaccacggtgagcactgccatcgtgggcatggtctg

SEQ ID NO: 38160 - DNA, 260 bp, Unknown
  Description of Unknown: RightRegion for integrase A728 sequence
ataacaggtactttcgcttcttgtctcttctcgcgatttccttcaccgcgacgcgtgacatcgagattgccataatttcgaccctcatatttctcaccatcatctacctgattaagacgcccgaagagcgagcaaaggatgggttcctttaaatttttgaaatttcaaaattttcccgccaaaaaagattctcaccgacgatgaggcacgcgccagaacccagcgcgtgtgtcatggtgcggtcaccggagcgtccgaag

SEQ ID NO: 38161 - DNA, 260 bp, Unknown
  Description of Unknown: RightRegion for integrase A729 sequence
gcagatgtgataggggtgaatgtgaagacgctatataagtacctaccagccgctgtgtagtcgttgggatggggcatggatggggcatgggaagtcagtgaaatccgccaaatattgcaaacaacgcatgttgatcactacatccagccattgaaaatggcgctcctggacgatatttgtcgatttttaaaactaactcatcaccgtggtgatatgacgagggtgactcactaccttgttgatatataagattattgttt

SEQ ID NO: 38162 - DNA, 260 bp, Unknown
  Description of Unknown: RightRegion for integrase A730 sequence
gtatcaaaaacgtatggagtagggctctcaactctgtataaaaagtttccagctagctaataacgggaaagaaacagagaagggcacaaatattgtgtactttaatgtgccctttaatttattgattggtggttgaattgtccgtaactttttgatttaagtgcaaatttctaataaattagaacactttcttaaattgtcatttggcatattacgaacaattccgcgtaaaaacgttctgttacgctaaacccttatcc

SEQ ID NO: 38163 - DNA, 260 bp, Unknown
  Description of Unknown: RightRegion for integrase A731 sequence
gtatcaaaaacgtatggagtagggctctcaactctgtataaaaagtttccagctagctgataacgggaaagaaacagagaagggcacaaatattgtgtactttaatgtgccctttaatttattgattggtggttgaattgtccgtaactttttgatttaagttcaaatttctaataaattagaacactttcttaaattgtcatttggcatattacgaacaattccgcgtaaaaacgttctgttacgctaaacccttatcc

SEQ ID NO: 38164 - DNA, 260 bp, Unknown
  Description of Unknown: RightRegion for integrase A732 sequence
gtatcaaaaacgtatggagtagggctctcaactctgtataaaaagtttccagctagctgataacgggaaagaaacagagaagggcacaaatattgtgtactttaatgtgccctttaatttattgattggtggttgaattgtccgtaactttttgatttaagtgcaaatttctaataaattagaacactttcttaaattgtcatttggcatattacgaacaattccgcgtaaaaacgttctgttacgctaaacccttatcc

SEQ ID NO: 38165 - DNA, 260 bp, Unknown
  Description of Unknown: RightRegion for integrase A733 sequence
gtggcattacaaatgggcgtatctcgcgccaccctttaccgcaatctggagaatgcataatgtttgacatcaacctgaccaagaacgccctcacccaagtgcaagaggctcaagcccaaaacgcccagctggcccgcctgatgtgtgacgttgcggatggccgtcactacatgatcatgcagggtgccaccaccgtgagcgtggttgcccggcagcagggtgaaactagagtggtgaaggtctacccgactcccttcctc

SEQ ID NO: 38166 - DNA, 260 bp, Unknown
  Description of Unknown: RightRegion for integrase A734 sequence
gtcgccacccagatgggcgtatcccgcgcaaccctgtatcgcaatttggagaccgtataatgttcgatatcaacctgaccaagaccgccatcgcccaagtggaagaggcccagaagctaaacacccagctcgcccgtctgctggctgacgttgccaactcccgccacttcatgatcatgcaaggcgcctcaaccgtgagcgtggtggcccgccagcagggtgagcaaagagtggtgaaggtctaccccacgcccttcctc

SEQ ID NO: 38167 - DNA, 260 bp, Unknown
  Description of Unknown: RightRegion for integrase A735 sequence
attgccaagcagatgaatatttcccgttcaaccctttaccgcaatctggagaccgtgtgatgagcgagcaacttactgttgataactttactcacctgcttgagtgctcgcaccggttcaggcgacacgttaagcgctactggatgaagtgccacatcttgagcaccactaagagcggtagcctcaaggttcaggtctatggccgcctgtactggggtggcgatgaggcaaaaatcagatacgtcgagcccatccgtgtt

SEQ ID NO: 38168 - DNA, 260 bp, Unknown
  Description of Unknown: RightRegion for integrase A736 sequence
gtggcctcacaaatgggcgtatctcgcgccaccctttaccgcaatttggagaaagcataatgtttgacatcaacctgaccaaatccgccctcacccaagttcaagaggcccaagcccagaacgctcaacttgcccgcctgttgtgtgacattgcagatggtcgcggatacatgatcatgcaaggcgccactactgtgagcgtggttgccagacagcagggtgaaaccagagtggtgaaggtctaccccaccaacttcctc

SEQ ID NO: 38169 - DNA, 260 bp, Unknown
  Description of Unknown: RightRegion for integrase A737 sequence
gtggcaacacagatgggtgttagccgcgcaaccctgcaccgcaatttggagactgcataatgttcgacatcaacctgacccgcaacgccatcacccaagtggaagaggctcaagacctcaacgcccagttggcccgcctcatgtgtgacgttgctgatggccgtggctatatgatcatgcaaggtgccacaaccgtgagcgtggtcgcccgccagcaaggcgaaaccagagttgtgaaggtctacccctcccccttcctc

SEQ ID NO: 38170 - DNA, 260 bp, Unknown
  Description of Unknown: RightRegion for integrase A738 sequence
actatctgggttcgagcgaaagcagagcgtgacgccatcatggccgaacacgcctccaagatggccgacctacgcgccaagcaggaacaagacagagccgagctgatgatcaaggcagccgccatggcagagcgtcaggcacaactaaaaaccctctgggccacctccgcgcccaagagcacaaaatgggaatacaagtcatgatattcggatacgcaagagtgagcaccgctgaccagaatcaccagcttcaactggac

SEQ ID NO: 38171 - DNA, 260 bp, Unknown
  Description of Unknown: RightRegion for integrase A739 sequence
acagtcttcacagcaaaataccatggaaaacgaaagtataatttcgacaagaaagattagaatatttccatgtaaagaacatattgatttattcaataaatgttttggtgctactagatatatttataataaaacattagatgctattaaaaaattatacaaaaagaattccaaagctcttcgcaccaaagccaaaaaaggatgtgttcatatcgcaccaaagaaaaaatcaggaagtaaaactaccaaacataaaactc

SEQ ID NO: 38172 - DNA, 260 bp, Unknown
  Description of Unknown: RightRegion for integrase A740 sequence
aattaatagtttgtgcagcattttgaatcacaatatcaagttgattttttccaaatatttcatttatttctccaacaagattatttatcgattgttttacatttgataaatcaaatgactgattctaaaaatctatataaaacaaacaccagattttttatttataactgatataaacattaattattatttaatcattaatgtcgtatgtcagttccaaagaagcgcaagccttcttcaaagtctccgatcaaactctt

SEQ ID NO: 38173 - DNA, 260 bp, Unknown
  Description of Unknown: RightRegion for integrase A741 sequence
gcaaacgttaaaaaaaggattaaagatgagaatgagtcgaggggagcttatcggatttaatggttgtcttggttatgattaccatgccgaagataaatcattaagtgtcaatgaagaagaagctgaaaccgttagatacatttttaatcgctatattgagggcgcaggatgtttcgtaattgctcgtgaacttgagaatcttggatataaaactgcaggaggtaaaaccaagtggtttgattcatcagtaagagggatta

SEQ ID NO: 38174 - DNA, 260 bp, Unknown
  Description of Unknown: RightRegion for integrase A742 sequence
tacgtagtaatttgttgtgttgctccattttttgttatataatcactaatataattataacacatatcattgtaaatattatccgttcccattttagtgcaaaaatttattaaattaactgtttcttaaaatctatttaaaacaaacacctattttttttatcataactgatataaacattatttattatttaatgattaatgtcgtatgtcagttccaaagaagcacaagccttcttcaaagtttctgaccaaactctt

SEQ ID NO: 38175 - DNA, 260 bp, Unknown
  Description of Unknown: RightRegion for integrase A743 sequence
atcatcaacctgattaatcagggtattgtcgatgaacaaatgcgtgaacgactagatgataaacaggcgagctttgatgcaacacttgaaaatagtgaagcagtaacgaagttccaccaatctattgtgaagaagaaacgtaaaaagaaaaagaaagtcgtaagtgacgatgatgagtggtaagaggagatgaactatacatggaagcagttgaaaagaaacgtggcccgtggtcagaagaagaagatttaattttgatg

SEQ ID NO: 38176 - DNA, 63 bp, Unknown
  Description of Unknown: RightRegion for integrase A744 sequence
acgcaggccgccaacgacgaccaggccctcgacgacgacaggggcgccgacggggggtgagcg

SEQ ID NO: 38177 - DNA, 64 bp, Unknown
  Description of Unknown: RightRegion for integrase A745 sequence
acgcaggccgccaacgacgaccaggccctcgacgacgacggaggcgccggcggggggtgagcct

SEQ ID NO: 38178 - DNA, 64 bp, Unknown; identical to SEQ ID NO: 38177
  Description of Unknown: RightRegion for integrase A746 sequence

SEQ ID NO: 38179 - DNA, 66 bp, Unknown
  Description of Unknown: RightRegion for integrase A747 sequence
acccaggccgccaacgacgaccaggcccacgacgacgacgggggcgacgccggggggtgagccgtt

SEQ ID NO: 38180 - DNA, 260 bp, Unknown
  Description of Unknown: RightRegion for integrase A748 sequence
tgcctcaatggctaaacttgttggtttagctgtttgctgaatcatctattttacctctttatattctacttttaacgcgggattcatgagacaacgcctttaaacctatataagcactctatttaatttttgtctatcagtttgtatacagttatgtataatactatgggcaaaaataaactaatcaggctgcgttatctatggttactggattaaaagattatagtgactgcgtggggtattgtcgggtttctactcaa

SEQ ID NO: 38181 - DNA, 260 bp, Unknown
  Description of Unknown: RightRegion for integrase A749 sequence
gcaggattgaccggggtcgattcgttacgtacccgattgagcgattttcgtcagtgttaaaatttgaatttataacttattcgttcagtagatgattactctttttgtatactgatgggagaattaaggatcgatggagctattttggcagggttgaaagttaatggaattgataagttgggagatgtgaacatggcgtttgagcagattccagaacattttcgttttattgcggaaacacttagatggcaaacaacaga

SEQ ID NO: 38182 - DNA, 260 bp, Unknown
  Description of Unknown: RightRegion for integrase A750 sequence
gagatcacggtctcgtctgacgtggtggaagtgacggaagcagacttacaacacgactaaccaccacggcttactacacgcatgagtacacagtcgttcaatttcacatggaaactctcagccaaacagcgggagttattcgagtcagacgcgcggttccgcgtgggcatgatgggtcgccggttcgggaagaacgaagtctcgacggcgatagaagtcgattacgccacccaaccccacaaatacacgttcggcacaga

SEQ ID NO: 38183 - DNA, 79 bp, Unknown
  Description of Unknown: RightRegion for integrase A751 sequence
agcctcggagaggccctcacaggggctttcgcagacgacccgggcgaggacggcggatagcccgtcgagggggtgagca

SEQ ID NO: 38184 - DNA, 79 bp, Unknown; identical to SEQ ID NO: 38183
  Description of Unknown: RightRegion for integrase A752 sequence

SEQ ID NO: 38185 - DNA, 79 bp, Unknown
  Description of Unknown: RightRegion for integrase A753 sequence
agtctcggagaggccctcacaggggctttcgcggacgacccgggcaaggacggcggatagcccgtcgagggggtgagca

SEQ ID NO: 38186 - DNA, 260 bp, Unknown
  Description of Unknown: RightRegion for integrase A754 sequence
agttatttgagcgatgaagaattagacaaagaattgaaggagttacaaggcgatgaataaaacaatgagcagggccgaaaaagaaaagctgtttatgctcattcgcgaaaagagaataagagcggcccgccggagtttttgggaatattgccgtttggagagcccggacttttacacaaaagagcgttggcatttgcagctttattgcgaaacgttgcaagccttgtacgagcgccgattaacaaaacaatgttttcgtg

SEQ ID NO: 38187 - DNA, 260 bp, Unknown
  Description of Unknown: RightRegion for integrase A755 sequence
actcggtgaaaaaaaatctctcgagaaatatgatttgtttcatctgagaataacgaatagtacaatgaatatatattcagttcatgctagtttcaatttttgcaatgcccaagaaaaattgaatattgaatgtaatataggtcccattagttagtggactaagtatctccagttattaattttctgactcattgcagattatggccacagttgtcgttgatggtaaagagcgaagtagtaattacgatcgacaccataat

SEQ ID NO: 38188 - DNA, 260 bp, Unknown
  Description of Unknown: RightRegion for integrase A756 sequence
tacttattagatatattcctattccatatcgcaccagacctaaaagtttggtactatctatttacagtggcatttataggagctattaaatcagtcatcttagtagaaatacaagacaaaagagaaaacaacaaataaaagtattgacacatcctccttgatactgtatacttattatatactattaaggagggttgtaattgagaaaattaactactacagatatacaagagatatatgtaagcactcagacacaaaag

SEQ ID NO: 38189 - DNA, 260 bp, Unknown
  Description of Unknown: RightRegion for integrase A757 sequence
ttaatagaagacttaataaaggaatattcaggaggaacaataaaaacaaaattatcgtagataacagtacaaacaattattttttcatagcgccgtttagccaagaagaaatagatgcattaatacctgaagaaaaaatattaatttttcaatttattcaatgtaatttataaaaattaaattaaacaaatttactgacgagctataatgcggcgcttttcttgaagactttgcaattttgaatggaacgcaaactgttt

SEQ ID NO: 38190 - DNA, 260 bp, Unknown
  Description of Unknown: RightRegion for integrase A758 sequence
agtgggagcaggtcggacggttgctggctgcgggggaatctcgtcaacgtgtggcactgatttttgatattggcctgtccacgctctataaaaaattcccctcatcagcgacaaagaataaattgtgtcatcccttagccaaccgggacaaatagcctgacatctccggcacaactgaaaataccactcacccattaaccacggagttaaccggatgagtgactatcatcacggcgtgcaggtgctggagattaacgacg

SEQ ID NO: 38191 - DNA, 260 bp, Unknown
  Description of Unknown: RightRegion for integrase A759 sequence
gagtggaatgtctcatctgaggtggtcgaagttgtctcgagcacaaccgaactcgaatagaacaatcggctatcgactgtctgaactccagaacagaatttatgactcagatagccggtttcgagttgcaatgatcggtcgtagaggtgggaaaaatgaggctgcgacagttacagcagttgattatgcaattgacccatcgaagtatgcatatggggcagatgagagtcctgtcatttggtgggttggtccgacataca

SEQ ID NO: 38192 - DNA, 260 bp, Unknown
  Description of Unknown: RightRegion for integrase A760 sequence
atttccgttgttatcgtatcccctacatatttatgagtgtttgccattgcaaaacaccgcctctctttaagttgataccatcgtaccatgtattttactaaaagacaacaactattttatatatttttcgtttttcgcctttcttctattataggcgaatttattaaatgtgatataatagagaaaagggggctttattaatgccatatatcaatgaaaatatagaattacacgggaacgctaaaaggatagaatacgag

SEQ ID NO: 38193 - DNA, 260 bp, Unknown
  Description of Unknown: RightRegion for integrase A761 sequence
atttccgttgttatcgtatcgcctacatatttgtgagtgtttgccattgcaaagcaccgcctctctttaagttgttaacatcgtatcatgtattttactaaaagacaacaactattttatatatttttcgtttttcgcctttcttctattataggcgaatttattaaatgtgatataatagagaaaagggggctttattaatgccatatatcaatgaaaatatagaattacacgggaacgctaaaaggatagaatacgag

SEQ ID NO: 38194 - DNA, 260 bp, Unknown
  Description of Unknown: RightRegion for integrase A762 sequence
gtttcatcgccggacatagaaatatcggtctctgaggcaacatatgagacatggcagtagcgcaagagtcaatcagtattaccccgaccgagtatcaagacgtattcttacgtaaagacaagcgttactatgcatttgtctcaggtgttggggcgggcaagacctacgctggtattgtccgaacgattctcaatatgcgtgattggaatcccggggaaatgggtgcaatcgttgcaccaacacgacagatggttgtaaac

SEQ ID NO: 38195 - DNA, 260 bp, Unknown
  Description of Unknown: RightRegion for integrase A763 sequence
gtctcatcaccggatatagaaatatcggtttctgaggcaacatatgagacatggcagtagcgcaagagtcaatcagtattgacccaacagcgtatcaagacgtgttcctacgcaaagacaagcgatattatgcgtttgtctcaggtgtcggagctggcaaaacctatgctggaattgtcagaacgattctcaatatgcgtgattggaatcctggcgagatgggggcaatcgttgctccaacacggcagatgattgtgaac

SEQ ID NO: 38196 - DNA, 260 bp, Unknown
  Description of Unknown: RightRegion for integrase A764 sequence
tttctgatatcatcttatcatgcaacataactttttgtaaagtgttatttttaacttttttaatttgttgttttgttatgttgcgttgttgatgtctcttatattaaaggtattatatttgaaagtcaacaggtttatgcaatttattttaaaaagttaaagttaatcatgatataatagagaaaaggaggtttttacaaatgccatatatagaagaaaaagttaaactacatggaaacgctaaaaggattgagtatgaa

SEQ ID NO: 38197 - DNA, 260 bp, Unknown
  Description of Unknown: RightRegion for integrase A765 sequence
tacaaatacctagagaagaacaactatgaatacaaaaatcaaaaactcaaacgaaagtgaatacatgccatctgttcgtggtaatccagcagatgcattgcagacattcttcgttaccattcgtgacacccgcacaggagaactacatgaggacatgagaactcatcactacaatgatgaagcctgtgcatactcagtcatgcaaaatttaaaagatgggtttgagctagtccacgttttcaacccagaactaaaaacta

SEQ ID NO: 38198 - DNA, 260 bp, Unknown
  Description of Unknown: RightRegion for integrase A766 sequence
atggatacaacagaaatagaagcagccatagctaagataagaataagaacaaaaaagtaatacttaatactcattaattttaattaaaaaaactaccattttatagatatttgatgtaaaaataaagcatggtgtaaatttacattgtaaaatatctattttgatgtaaaaataaaattaaaaacgtaattaatttacaaaaagaaggataagtctttgactctaattttacatttatgctataatattatttatagagt

SEQ ID NO: 38199 - DNA, 260 bp, Unknown
  Description of Unknown: RightRegion for integrase A767 sequence
aaaatagatgctcccattttgttacgcacccgattaagcgattttcgcacatcgagatgaacagataatgtacaaaaaattgatttatatggtggagaggatgtcctttatctctggatatatatcagaagctgcaatggccgcagctgtcgccgttgttgaaagtaaaaccggtcatgatggatttcctaattttttcgaagacttttatgaagttaaaccgaaagacacgactgtggcgtgtatcgcgagtgccaaag

SEQ ID NO: 38200 - DNA, 260 bp, Unknown
  Description of Unknown: RightRegion for integrase A768 sequence
ggctgctaccagcgcgcgcggagggcattgcgccgggtggccgaggaggtggggctgtgagttgccgctaccagttcatgggcgagcaggaggacgccgacctcgacgtggtgctgtcgaggggcatgacacgcgtctacgacggtacggcggcgccgcgctccgggcgtgtcggctgccccatcgccgggtgccccgacgctgaggcggaggacaccctgtgtgaggcgcactggatggagttccatgcatcgcctgag

SEQ ID NO: 38201 - DNA, 260 bp, Unknown
  Description of Unknown: RightRegion for integrase A769 sequence
cgtacaaatgcggaaatcgaagaacagcttcagaaattaaaaaaattgacaggcgagtaaaaggagggcgggctacatggcatatatagacggtaaatggttagcccgtcaagaacgtcaggagcgtatcaatcttgtagcagaaagagcaaagaaattacaggagttgtacgaaactggcgaggctacagaatattatatggatacactacttgctgacatcgatgagctagaaaagttaaaaagggtacatcgtggag

SEQ ID NO: 38202 - DNA, 260 bp, Unknown
  Description of Unknown: RightRegion for integrase A770 sequence
tcagaaattgcaagaggtaaaaaattcggtgaggttgtagaaatggaggaagcaaactaatgtgtgaagttaaaaatactatggcccaattagaagcagctttaaaagtaaatccatcaattttaaaaggtgtacaagctttaataaataaatacgatggcgcagcagctcccaactcctacgccgcattaaaaaacaatatcactaccagtaataccctaaacacgttgattgtattctgccaaaattgcgatttacaa

SEQ ID NO: 38203 - DNA, 260 bp, Unknown
  Description of Unknown: RightRegion for integrase A771 sequence
attgctcgtaagtttggatgtaagcgggatactgtataccgacttttaagactacgttgatttaggtgacactatagaaggtagcctaggtaatctaggtcttataggtagtatagataaataagctaaatataggagattaaatatgtcaatggtaactactctggtagcactgtctcaattcttccgtaacctgtccactcgtatccgtaacaaggcaatcaatgcaatcaaagaccgcatcgctgtggttgaagacc

SEQ ID NO: 38204 - DNA, 260 bp, Unknown
  Description of Unknown: RightRegion for integrase A772 sequence
cccaagccggctgcggacaaggcaaagctggtcagcaagattgaggcccagctggctgaggccggcaggccatgggagtacggcgacggtttggcaaagcgcctgtaccaggtagagcggctggagtggcttgactccaagcaactgggtggcgtcgtcgccgctctggccaaggacgcgaaacgacacgggaggcgacaatgagcaacggagagttattcgatagtggggaggtcgacaagctagagccggacaaggtg

SEQ ID NO: 38205 - DNA, 260 bp, Unknown
  Description of Unknown: RightRegion for integrase A773 sequence
accacgctgcgccgccacgggcacgcgctgggcaccaagggccgtgcgtcgtggacgtagacacctcgttcgactgggacgtctggcgcaaggcctggggcagcaacaagcaggtcatcgtcggcggggtcaacgacttcttcgcgctcccggagccgccgggggattgcgagtggctgctgacccggaccctgaccggcgagcaccccacctacaagctggcgctgctgtggcgcgagctgttcgacaccgggccgcac

SEQ ID NO: 38206 - DNA, 260 bp, Unknown
  Description of Unknown: RightRegion for integrase A774 sequence
gcgtgttttttagaaaacccaataaagataattataatgtagatgccttagatcttgtagatttatgcaatcgttcatattcagacatatctaattccatattcgttaataaaaaagcagatagcatagatgactagtttgtctcaagtcgttacaacgtgtgtttaatttaaagcttttttatattatccattatataaatggaagtagattatgttacaacgaaagaaacttgtcgaattacaggtttcaaagctcca

SEQ ID NO: 38207 - DNA, 260 bp, Unknown
  Description of Unknown: RightRegion for integrase A775 sequence
tatgcggatgagggaatctcagcaactaatacaaaaaacgtgatgcttttaaccgactaatacaagattgtagagatggtaaggtggatagaattttagttaaatctattagtagatttgccagaaatacattggactgcatcaaatatgtaagagaactgaaagaactaggcattggtgtaacgtttgaaaaagagaatattgatagtctagattcaaaaggagaagtactacttaccattctatcgtcactagcacag

SEQ ID NO: 38208 - DNA, 260 bp, Unknown
  Description of Unknown: RightRegion for integrase A776 sequence
aatgtagagagaaaaacaggttctaaagaagaagtacttaatgatgaacaagaggaataagaaattgtagtagaattgtaggtgtgtaacatatgagtttttcagataaattaaatgagatgaggaataaagaacattatggttctcctagtaatgaagaaaatacacaaataaagaatatagaatcaggttatacattagaagagcttaaacattccttattagatttagaaggtttagaaaatgtagtaagtaattac

SEQ ID NO: 38209 - DNA, 260 bp, Unknown
  Description of Unknown: RightRegion for integrase A777 sequence
gacgctgatttagagcaagaattgggcgaactagacgaattattaaaggacgatgattgaaacgaggtgataacgagtgggaattttgagtaaaatcggacgcaaatccgacgcagagttaaacgaaaccggatccgtcacttacacatatgacgcattcaagcctggtgaacaatttccgccagcaaacgcaattgaaagaatttcgaaatatcgtcgtatgaaaaagttatatgacggtaaacaagccgaaatatacg

SEQ ID NO: 38210 - DNA, 260 bp, Unknown
  Description of Unknown: RightRegion for integrase A778 sequence
gacacatcacctgcaaatgacaacactcccgaacgactactaaccgctatggggcaatgacgaaatggagtttttccagaaatttctagataacattgggtggggcatcgctggcataatgggtgcgctggtttcgctcccgttccacgatgacatcaaatctgtaaaggcgcgcatctggttcgtgtgtaccggtgcaatctgcgcttacttcctgacagacctggtttctttgtatttcaaaattgatcgcgggctgg

SEQ ID NO: 38211 - DNA, 260 bp, Unknown
  Description of Unknown: RightRegion for integrase A779 sequence
atacattaatataggaaattgttgtcaccttagtcacccgaacgccaaaaacgcgcactttctctttataaatcaagatgattgacgggtgacaagcgggtgaccaactctttgccaccttgtcacccttttctggtcaccgttcatcttttcggctacaatccccatattgacttttatttataattattgggggttacatggaattaccgcgcactgtgcaggaaatagctgacgttattggccgtgaacgtgcgcta

SEQ ID NO: 38212 - DNA, 260 bp, Unknown
  Description of Unknown: RightRegion for integrase A780 sequence
aaagaactaaatgtaaaacatccacaattattaaaatatatatcagacaagaatttataaaaaagaattggtttattttttcgttttagaatttttctttactgttttttcttcctcttctgaacttgattctgaaaaactgctttccgattcactttcttcttttttagaaaattttttttgtttctttttatctttgatattttttatttttacatcttctttttctgattccgaatctgatgaactactttcttttt

SEQ ID NO: 38213 - DNA, 260 bp, Unknown
  Description of Unknown: RightRegion for integrase A781 sequence
gtaatgaaacgcattgaagaattgcgtaaaatgcaggagtcggtgaaacaggatgagtagtaaatctagcgaatttatttcgccgagagaggaacgtctcgagcttcaacggttacttaccgaagagttgtcgctattaatcgagttgattgagtgggggaaggcggaaccttcgcactatgaccgctttaaagaagtagacgaagagttaacgcaaatcaaacgaattaatcgcgctgaatatgacgtggcctattttg

SEQ ID NO: 38214 - DNA, 260 bp, Unknown
  Description of Unknown: RightRegion for integrase A782 sequence
cagaccatgagtattagtgattctaaaggacaagaatttaaagttgagtggtccaaatgaactttgatatgaaaacagtattgccttacatcgtgattgtagcaagtttagcgatgacatggggtatgtggagtcaaagattagaagctgttgaaacaaaagcagattctatatcatatatgcaacaagatatagctgtcatcaaagaaaaaataatatggatagagaactaccttataggtaattaatgaaaatgtttt

SEQ ID NO: 38215 - DNA, 260 bp, Unknown
  Description of Unknown: RightRegion for integrase A783 sequence
cacgggcaaagatcggaagggttacgccagtaccagcgcagccgtttttccatttcaggcgcataacgctgaacccagcggtaaatcgtggagtgatcgacattcactccgcgttcagccagcatctcctgcagctcacggtaactgatgccgtatttgcagtaccagcgtacggcccacagaatgatgtcacgctgaaaatgccggcctttgaatgggttcatgtgcagctccatcagcaaaaggggatgataagttta

SEQ ID NO: 38216 - DNA, 260 bp, Unknown
  Description of Unknown: RightRegion for integrase A784 sequence
caggaaattgaacatactggaacggtggtgtttgcgaatgaagacaacatcccagattaaagttgatttgccaactatagttggagaaggttacggggctttttggggtgataaacatttttatagagtggtaaaaggtagccgtgggtctaaaaaatctaagactaccgcccttaattttatagttagattactgaaatatgaatgggcgaatttattagttgtccgcagatattcaaacactaataagcaatcaacct

SEQ ID NO: 38217 - DNA, 260 bp, Unknown
  Description of Unknown: RightRegion for integrase A785 sequence
agaaagctgcatacacggcgtcatcagcctgatctgttctcacctgaaagcccaaaataaccggcatcctgccggttatttcctgtcaccataatcccgcacctgtcacctgattttttagactgccatcagagatttttttcagggaagcatgatggcggggataccaaaaaaactgaaagccgcactgctggcggcaacgattgccggtggtggtgtgggtggttatcaggaaatgacccgtcagtctctgatccatc

SEQ ID NO: 38218 - DNA, 260 bp, Unknown
  Description of Unknown: RightRegion for integrase A786 sequence
agaaagctgcatacacgacgtcatcagcctgatctgttctcacctgaaaccccaaaataaccggcatcctgccggttatttcctgtcaccataatcccgcacctgccacctgattttttagactgccatcagagaattttttcagggaagcatgatggcggggataccaaaaaaactgaaagccgcactgctggctgtaacgattgccggtggcggagtgggtggttatcaggaaatgacccgtcagtctctgatccacc

SEQ ID NO: 38219 - DNA, 260 bp, Unknown
  Description of Unknown: RightRegion for integrase A787 sequence
tggccgaggtgatcactaaaagtggtggtcgcattccatcgaacaacgattgcacaggcccagctggttacgaactattagctgaacattatgcgagtaactactacaaaactggttaacgtgccccaccagtaaacactgccatatactacaaacacctcgccaagcggggtgtttttgtatttatactatgtgaaggtatgccatgtggatgggaggcagtaatgagtgaagaaaaccaagacttgtttggctacaag

SEQ ID NO: 38220 - DNA, 260 bp, Unknown
  Description of Unknown: RightRegion for integrase A788 sequence
agaaagctgcatacacgacgtcatcagcctgatctgttctcacctgaaagccagaaataaccggcatcctgccggttatttcctgtcaccataatcccgcacctgccatctgattttttagactgccatcagagcattttttcagggaagcatgatggcggggataccaaaaaaactgaaagccgcactgctggcggcaacgattgccggtggcggtgtgggtggttatcaggaaatgacccgtcattctctgatccatc

SEQ ID NO: 38221 - DNA, 260 bp, Unknown
  Description of Unknown: RightRegion for integrase A789 sequence
aatcctatgaggcaagcagaatatgcatatagtttaatcggaaatgaggtgagcacttaatgaatcttgctaaaaatattaccatgattcctacaagaagaatggtgggtacgcaaaagcctgcagaaaagacacaaaaattaagagtcgcagcctacgccagagtatctacggagtttgaagaacaggaatcaagttatgatgtgcaggttgaacattatacaacttatattaagagtaatccggaatgggaactggta

SEQ ID NO: 38222 - DNA, 260 bp, Unknown
  Description of Unknown: RightRegion for integrase A790 sequence
ccagttgatccttttgaacgagcagaatacttatatagtctgatagaaagcgaggaataaagtgacagagaaaaatataatggttattcctgctcgtaaaagagtaggaagtacagccgcaaaagaaaagataaagaaacttcgtgttgctgcctattgccgtgtttctacagaaacagaagaacaaaattctagttatgaggttcaggtcgcacactatacagagtttataaagaaaaataatgaatgggagtttgccg

SEQ ID NO: 38223 - DNA, 260 bp, Unknown
  Description of Unknown: RightRegion for integrase A791 sequence
tctgctgtacttaacacattcaaagagtgcgaagataaaatagtaggtatagaagaatagataataaaaagatagcctagtttataagctatcttttttcattatgaaaaaattttaactagataagggactataaatattaataggatactcataatacctagtctaacagcaacatctatgttcatatggctacttttcttcacaaaatcacctcgactatttttctaaattattaacgaaaaaggaaataatataca

SEQ ID NO: 38224 - DNA, 260 bp, Unknown
  Description of Unknown: RightRegion for integrase A792 sequence
gatccatataagcaggcagagtatgcatatagtcaaatattggaggtagcaaatgaatgagaacgtaacattgatacctgccagaatacgagctggtaatcgaataacaaggcaagaaaataagcctaaattaagagtcgcagcgtactgtcgagttagtactgacagcgatgagcaggcggggagttatgatgtgcaggttaagcactatacagaatatattggcaggaataaagaatgggaacttgctgggatatatg

SEQ ID NO: 38225 - DNA, 260 bp, Unknown
  Description of Unknown: RightRegion for integrase A793 sequence
ttctgggcttaccccttcctgaccgacttcacatcattccgcccgctattactcaaatagcactttttgccaaacacgccgggggcaaccccggtaatatgctttccatcggcagcgaacgcagccaaccacttaaaaggaaacgcatcatgaccactaaaactgaattattcgcagagttgaacgataaagaaaaccgcgtaaatgctaccgcccacatcgcagtatataaagacggcaacggtaacacctctgtgatt

SEQ ID NO: 38226 - DNA, 260 bp, Unknown
  Description of Unknown: RightRegion for integrase A794 sequence
caagatataaacgaattagaaaatgaattaaataattttagattaaaaaaagttaaataaaataacaataaaagaaagttagataaatcttaactcaatataatttttattatattgagttacatatagtgtatgaaaaataatcgtatacaatatgtagtaagaggggtcgaaactatattattgttaataattgtaagattgataaaaaaatatacccccccccacacccttattttgaaaaaatcttttttaaggga

SEQ ID NO: 38227 - DNA, 260 bp, Unknown
  Description of Unknown: RightRegion for integrase A795 sequence
ttcagcgcctacccattcctgaccgacttcacatcattccgcccgctattactcaaatagcactttttgccaaacacgccgggggcaaccccggtaatatgctttccatcggcagcgaacgcagccaaccacacaaaagaggccaaagcgatggaaaacatgacagtaaaaaccccggtagatatccagatgcaaaagttcaacgttaagacagcgattcacactttcaagtttcacgccgtgcgcaacgctgaagcatt

SEQ ID NO: 38228 - DNA, 260 bp, Unknown
  Description of Unknown: RightRegion for integrase A796 sequence
ttcagcgcttaccccttcctgaccgacttcacatcattccgcccgctattactcaaatagcactttttgccaaacacgccgggggcaaccccggtaatatgctttccatcggcagcgaacgcagccaaccacttaaaaggaaacgcatcatgaccactaaaactgaattattcgcagagttgaacgacaaagaaaaccgcgtaaatgctaccgcccacatcgcagtatataaagacggcaacggtaacacctctgtgatt

SEQ ID NO: 38229 - DNA, 260 bp, Unknown
  Description of Unknown: RightRegion for integrase A797 sequence
ggcaaaaccctagaggacttctacgccgacgaagatgtaccgcctcaatccagtccttaaagacttctggacaacccggaagccttacaagctactcaagggaggccgcttttcctcgaagacgcaagacgctggggggatggcggcttttttggcgcgcaactattccgtccgtttcctttgccttcgccagtttcagaaccgcatagctgattctgtttacacggtcgtgaagcaaaagatcgaggaagcaggctggc

SEQ ID NO: 38230 - DNA, 260 bp, Unknown
  Description of Unknown: RightRegion for integrase A798 sequence
ccggactgccggagatgtcagggccaaaaatccgtccaccacacctgccagagcaactaggagccgcaatgaccgccaccgaaatcgacaccaaatcaccgacccgtatgggagtcctcgcctgtggacactgcctcgtggggcaccatggctgctgcccgggtggagtccgcaatggcaacggccaaatcatcctctgcgcctgtaagtgggacggctgcagggcagggcgaccccgctgcaccgactgcaacaaccgt

SEQ ID NO: 38231 - DNA, 260 bp, Unknown
  Description of Unknown: RightRegion for integrase A799 sequence
ccggactgccggagatgtcaaggccaaaaatccgtccaccacacctgccagaacaactaggagccgcaatgaccgccaccgaaatcgacaccaaatcaccgacccgcatgggagtccttgcctgtgggcactgcctcgtggggcaccatggttgctgcccgggtggagtccgtaatggcaatggccaaatcatcctctgcgcctgtaagtgggacggctgcagggcagggcgaccccgctgcaccgactgcaacaaccgt

SEQ ID NO: 38232 - DNA, 260 bp, Unknown
  Description of Unknown: RightRegion for integrase A800 sequence
cattccatcggtgaaatgacagacgaagatcttgcaaaggttattgcgggggagaaataacctcgtgaccataaccaaagcccaagccgcccaagagcttctaaacagacgtaaggctcgtcgaaatctggttgattatgcccggtacattgaggttccgggagctcctgttgaagaacaggacgaggaaagcgacgaagcagaatattttgctgagacgcagttagctaaacatcacatattgatacttgaagccgctc

SEQ ID NO: 38233 - DNA, 260 bp, Unknown
  Description of Unknown: RightRegion for integrase A801 sequence
gataaaagtatgcagcatatctatcgcgtagtcgctaaaaatgcgcaagatagaagttaagaaccgtcaaccgaatttattttaaggaattgaaaatgaccatattcgacttaatagttactttaatcgttggatttattactgccttccctctttgtagggttgctaagaatcaaggcttcaaagccgattggtgggtaatgttagtattggttctgatacctgttttacaaatcccttatctttactggattgctttt

SEQ ID NO: 38234 - DNA, 260 bp, Unknown
  Description of Unknown: RightRegion for integrase A802 sequence
cgcgtagtggctaaaatgcgcaagatagaagttgagaaccgtcaaccgaatttattttaaggaagggaaagtgaaaaaattatgtttgatgcttatgatgttatcaccaactgcgttagcttcgacagttgatgagttaattgaaagctttgaaaactctaatatctatagtgctgattggtatgaaaaaggctctagcaaaattgctgaatcatcgaatgactatagagacatcaaggtaaatttaactgacaaaaaag

SEQ ID NO: 38235 - DNA, 260 bp, Unknown
  Description of Unknown: RightRegion for integrase A803 sequence
tgtgcgaactcttggcctacttcatggggctgtggatataggctaccataaaaatgaaggtacttatgtctatgagattaatactgcatgtggtttgatggggacaaccctacagctatatgcaaatgccttccgtagatattttggtctggcggaggttgtatatgaaaaagagaatacttaaaaaatatcttcatcctgtgttcagaaaaaaccaagattattttattgatgaaattggtaatgttacacgaaaggat

SEQ ID NO: 38236 - DNA, 260 bp, Unknown
  Description of Unknown: RightRegion for integrase A804 sequence
gtgaaagctctccagaatgtcattctcatactaggtcatcaacattcagaggatgactagctatgaagaaattccgttgggctaagaatcgtcctgttaaaccagacacagacccaatgctctcagatttgagagaggaattgctcaatgacgataggacttattaccagaaagccaatgcctctgggatagctccatccacaatcagaaacatcgtgaatggtaagactcgtaaaccacagggacttaccatcatgatg

SEQ ID NO: 38237 - DNA, 260 bp, Unknown
  Description of Unknown: RightRegion for integrase A805 sequence
aaggccattcgccggatgcgacggctgaaataccgccagtaccagccctcacttctgtaaacagtaaagccggttaatccggctttttttacgtcctcaatatcctgtgatgaataaccgtaccgggggaaatcatcatgggtaaaggctggaatgcatcctttcatcttggcagacgtgagcggctgcgtcaggaggttttgcaccgtgtcgccggtgggccacggcctgcgccccgcgactataccggtcatgatggc

SEQ ID NO: 38238 - DNA, 260 bp, Unknown
  Description of Unknown: RightRegion for integrase A806 sequence
aaagccattcgccggatgcgacggctgaaataccgccagtaccagccctcacttctgtaaacagtaaagccggttaatccggctttttttacgtcctcaatatcctgtgatgaataaccgtaccggggaaaatcatcatgggtaaaggctggaatgcatcctttcatcttggcagacgtgagcggctgcgtcaggaggttttgcaccgtgtcgccggtgggccacgtcctgcgccccgcgactataccggtcatgatggc

SEQ ID NO: 38239 - DNA, 260 bp, Unknown
  Description of Unknown: RightRegion for integrase A807 sequence
ttggctatatcagggtgtcaacaaatgaccagaacactgatttgcagcgtaacgcgctgcagagcgcaaattgtgaactgatttttgaagacagaataagcgggaaaaagtcagacaggccgggactgaaaaaagcactgcgctgtctgcaggaaggcgacacactggtggtgtggaagctggatcgtcttggccgcagcatgcgccatctggttatgctgactgaggaactgcgcgaaaaaggaataaacttccgcagc

SEQ ID NO: 38240 - DNA, 260 bp, Unknown
  Description of Unknown: RightRegion for integrase A808 sequence
ctcttctttttgtacttattttgaaatattcttaattttttatattcaatcataaatcacctaattttatcgctgagttaattatctgtaattaaataatatatatttagctatataatttcctaataacatatagtttacagattcggaaaatgatgatataataaatttacaagaagatatatgagaggtgaaataaattgagtagaaaaagaatgctttctgagaatgatgtaaaagaaatattacagttaagagat

SEQ ID NO: 38241 - DNA, 260 bp, Unknown
  Description of Unknown: RightRegion for integrase A809 sequence
gatcatgttgtgattctcctctattcgtgtcgcttggttgacatgtaggtccatttggaccctatgtctagcatcttttcactttttgggtgaaattatttttacgcttaactttccccttttggttgacatgtgactcgggacaggagtacggatcagacaacccggcacggaatcgccggacctaagaggagagaaatatgtcgtcaaaacccaagcccggtttcatgcgcccgagggcgaaccgggatgagatggcc

SEQ ID NO: 38242 - DNA, 260 bp, Unknown
  Description of Unknown: RightRegion for integrase A810 sequence
ttctctggaaattttgaacttgtaattgatgggaatgagataaatgattctgaggattaaacatcctgaaaagatatttaatgatgtatattttaaaaatttgaaaaataattttggaacacagatttattttggtggggcatcttctgggaaatctttttttattttagggcagaggacaatattagatgttttaacttctaatagaaatttccttattgttagaaatgttgcgagaacaaatagacattctactttta

SEQ ID NO: 38243 - DNA, 260 bp, Unknown
  Description of Unknown: RightRegion for integrase A811 sequence
ttctctggaaactttgaacttgtaattgatgggaatgagataaatgattctgagaattaaacatcctgaaaagatatttaatgatgtatattttaaaaatttgaaaaataattttggaacacagatttattttggtggggcatcttctgggaaatctttttttattttagggcagaggacaatattagatgttttaacttctaatagaaatttccttattgttagaaatgttgcgagaacaaatagacattctactttta

SEQ ID NO: 38244 - DNA, 260 bp, Unknown
  Description of Unknown: RightRegion for integrase A812 sequence
atcgcctgcgccgtggacgtctatcacgacgaaacctcagagaccgctgctgcggcctgaatgtcaaccgaaagaggagtattacaccgatgagaaccagagtgaacgtaggccgggtgatcctgccgctccacggcaagagcaaggccccggcgcagcgcctcgcgcattggatggcgatgcaggagatggcgggcttcaaccacctcggccacccgcgcggtttccgtatcgccccgacgagccggaagaaccgccgg

SEQ ID NO: 38245 - DNA, 260 bp, Unknown
  Description of Unknown: RightRegion for integrase A813 sequence
aatgccaatgtagaaaaagttaaatcattctcggagatgtatggcaacgttaaatcctaatctcatcgactattggttcgatggcaatccagagcctagtaacttcataaaggttcgtcaccgcgttttatatggcggtcgttcgtcatctaaatcatgggagtttgctggaatggctgcgtgtcttgctaatcaatataagacgcgctttctgtgcgttcgtagatatcagaacaagattaaggaatcggtttacacgc

SEQ ID NO: 38246 - DNA, 260 bp, Unknown
  Description of Unknown: RightRegion for integrase A814 sequence
aagaaagtcactaaagaagaaattgcaagacggcagtttgatatgtttggcaatacgtaactgctagaagtgagaaaaaacgtccagaagggcgtttttttattcatatttatttacctttttggtaaataaaaaatgttgactaatatgttttaattcattaaaatgcgctttagatcaactagaggagagtaattatggcacttacagaattcggcaaagcggttcgtaaggcaagaattgatgctaacgaaactttg

SEQ ID NO: 38247 - DNA, 260 bp, Unknown
  Description of Unknown: RightRegion for integrase A815 sequence
aatgctaacgtagaaaaagttaaatcattctcggagatgtatggcaacgttaaatcctaatctcatcgactattggttcgatggaaatccagagcctagcaacttcataaaggttcgtcaccgtgttttatatggcggccgttcgtcgtctaagtcatgggagtttgccggaatggctgcgtgtcttgccaatcaatacaagacgcgctttctgtgtgttcgtagatatcagaacaagattaaggaatcggtttacacgc

SEQ ID NO: 38248 - DNA, 260 bp, Unknown
  Description of Unknown: RightRegion for integrase A816 sequence
gacgagcaatcgaagatgatccgcggcctctggcttgagctggcggatcggggcgtcgtacagaaccggtccgaggaagcgctcggggctttcgtaaagcgcatgacccatgtcgatgcgctcgaatggctcagttccgcccaggcatcccgtgtaatcgagcacctcaaaaaatggcgtgacaggacgacggaggccgtatgaaggacgaaacgttcaaaagcaaagggccggaactgctggtcgacttgtctctgcag

SEQ ID NO: 38249 - DNA, 260 bp, Unknown
  Description of Unknown: RightRegion for integrase A817 sequence
gacgagcaatcgaagatgattcgcggcatctggcttgagctggcggatcggggcgtcgtgcaaaaccggtctgaggaagcgcttggcgctttcgtaaagcgcatgacgcacgtcgacgcgctcgaatggctcagttccgcccaggcatcccgtgtgattgagcacctcaaaaaatggcgtgacaggacgacggaggccgtatgaaggacgaaacgttcaaaagcaaagggccggagcttctggtcgacttgtctctgcag

SEQ ID NO: 38250 - DNA, 260 bp, Unknown
  Description of Unknown: RightRegion for integrase A818 sequence
gatcaagcaacaccaaaaagtataaaagtggaagtgatcgacgctagacaatctaattaatgaaactaagcgtcaatgtcccacaatcgcaatttttaaaccttactaataaatatcgcgcttatgttgctggttatggtgctggcaaaacgtttattggttgcgttgctcagtgcttggacttctggaaatatcccggaataaatcaagcctatttcgcgcctaccttcccacagatacgggatatctattatccaaca

SEQ ID NO: 38251 - DNA, 260 bp, Unknown
  Description of Unknown: RightRegion for integrase A819 sequence
aatgaaaacgctaacgttgaatctgtaaaatcattttcggatatgtatggcaactcttaacccaaatcttgttgattactggtttgatggtaatccagaacccaagaactttataaaggttaggcaccgtgttttgtatggtggtcgatcttcatctaagtcgtgggaatttgccggaatggctgcttgtctggctaatcaatataagactcgatttctttgcgttcgtaggtatcagaacaaaattaaggagtccgttt

SEQ ID NO: 38252 - DNA, 260 bp, Unknown
  Description of Unknown: RightRegion for integrase A820 sequence
cgtctgatgcagcgcatcaccgcgatcgagctggaggaccggttcatccagatcgcaggcgagccattgctcgacaccgacgagggcgtcctcgtcatcgagttcggggacgggcgtcaccggaccttcaactgggaccacgtcgtgtccttctactacatgaccgaagaagagtcggctgcggctcgggaggaaaactgatgagcgacaccatcgcacaggcaaccctggacatcgacacgctcaagcggggcatcgag

SEQ ID NO: 38253 - DNA, 260 bp, Unknown
  Description of Unknown: RightRegion for integrase A821 sequence
acagctgaaatcctgaagtgccagcgaggaacgatcagaaaatatatggtgaagccatgagaaagcacgcaagaaagccagggcatgtcgagttctgcggaacctgggtaagcccgaaaggaaaacagatatacgaggcgctggaatccggcaagagctggcaggcttgcgctgatgagttcgggatctctctcgggacaatcagcggttacgcagagcgagctcggcgattcgggatagtgctgcgccagaacaagcga

SEQ ID NO: 38254 - DNA, 260 bp, Unknown
  Description of Unknown: RightRegion for integrase A822 sequence
gcaagcagtacgttgaacaggagaagacacagacagagatcgctgacgagtgtggagtagccgtgcctaccattagcgactggctcagcaagtgtggcatctcacgtgattgactggactggagtaacagcggtatgcaggcgatcagcacatccagtgagattgcgtgtgactaaccgcgggactgtagtatcaagagtgtgatgaccgacgcaggcacaatggatccgagcgacacctaccgcgacgaagactggctg

SEQ ID NO: 38255 - DNA, 90 bp, Unknown
  Description of Unknown: RightRegion for integrase A823 sequence
aatgccaatgtagaaaaagttaaatcattctcggagatgtatggcaactctagcacctaagcagtataattactgttgaggtgattaata

SEQ ID NO: 38256 - DNA, 260 bp, Unknown
  Description of Unknown: RightRegion for integrase A824 sequence
aatgaaaatgccaatgtagaaaaagttaaatcattctctgaaatgtatgcgggtaaataatgccaactctaaacccaaacttgcaagactattggtttgatggtgagccaaagcctgagaacttcatcaaggttaggcataggattctatatggcggtcgttcatcttctaagtcatgggagtttgctggaatggctgcgtgtcttgctaatcaatacaagacgcgcttcctttgtgttcgtagatatcaaaacaagatt

SEQ ID NO: 38257 - DNA, 260 bp, Unknown
  Description of Unknown: RightRegion for integrase A825 sequence
aatgaaaatgccaatgtagaaaaagttaaatcattctctgaaatgtacgcgggcaaataatggcaactctaaacccaaacttgcaagactattggtttgatggcgagccaaagccagagaactttatcaaggttaggcataggattctatatggcggtcgttcgtcatctaagtcgtgggagtttgccggaatggctgcgtgtcttgccaatcaatacaagacgcgctttctgtgtgttcgtagatatcagaacaagatt

SEQ ID NO: 38258 - DNA, 260 bp, Unknown
  Description of Unknown: RightRegion for integrase A826 sequence
gtggctgaaatcctgaagtgccagcgcggcactgtcagaaaatacatggcgaagccatgagcaagcacgcaagaaaaccagggtatgtcgagttttgcggaacctgggtaagcccgataggaaagcagatatacgaagcgctggtgtctgggatgtcgctgcgggatgtatcagacaagttcgagatctcaatggggacggcatctgggtatgcggagcgggctcgcaagtacggcgtcctcaagcgcaggacgaagcgc

SEQ ID NO: 38259 - DNA, 260 bp, Unknown
  Description of Unknown: RightRegion for integrase A827 sequence
gtggctgaaatcctgaagtgccagcgcagcaccgttagaaaatacatggtgaagccatgagcaagcacgcaagaaaaccagggtatgtagagttttgtggaacctgggtaagcccgagaggaaagcagatatacgaagcgctggaatccggaaagggcttgcaggcttgcgctgatgagttcgggatctctctcgggacaatcagcggttacgcaaagcgggcgcgtcgatttggaatagtcctgcgccagaacaagcgg

SEQ ID NO: 38260 - DNA, 260 bp, Unknown
  Description of Unknown: RightRegion for integrase A828 sequence
tacctgcgcgcggtggtgtggggcctggccagtgatccagcgcaggctctggccgcttcctcaaagcggccgcaggccggtggacccagcacccagcaattgctccaagaccaagtcggtcgaattcagtccgatatcgtgttggggctgattactaaagaggatggagagcgccagatcgcggcgctgaaggggggagcatgaagcagagttcgattctggcggaaactcgccatgagctgctggacgacattgcggca

SEQ ID NO: 38261 - DNA, 260 bp, Unknown
  Description of Unknown: RightRegion for integrase A829 sequence
ttgcaatgcccctgctgcgccgagcagttcccggtagaggtccaggcccgggccgcttcctcaaagcggccgcaggccggtggacccagcacccagcaattactcaaagaccaggtcggtcgagttcagtccgatatcgtgttggggctgattactaaagaggatgaagagcgccagatcgcggcactgaaggggggagcatgaagcagagttcgattctggcggaaactcgccatgagctgctggacgacattgctgca

SEQ ID NO: 38262 - DNA, 260 bp, Unknown
  Description of Unknown: RightRegion for integrase A830 sequence
gcggctgaaatcctgaagtgccagcgcggcactgtcagaaaatacatggtgaagccatgagcaagcacgcaagaaaaccagggtatgtcgagttttgcggaacctgggtaagcccgagaggaaagcagatatacgaagcgctggaatccggcaagggcttgcaggcttgcgctgatgagttcgagatctctctcgggacaatcagcggttacgcaaagcgggcacgtcgatttggaatagtcctgcgccagaacaagcgg

SEQ ID NO: 38263 - DNA, 260 bp, Unknown
  Description of Unknown: RightRegion for integrase A831 sequence
acaccggtgactccaggtttactacgctgcagattaagcgatttccgtgaggcgatttaaattataatccaatgaccatctaccaaaaatggattctcccattgaactctcattttctcccttcgtgccaacttaatcgtgaaatcagcactcctaatagtcaaatcatacccacaatcattaattttacggatggtgaatattttactaaattcataactaaaaaatttcggaagtagaatttcgattggataacaatc

SEQ ID NO: 38264 - DNA, 260 bp, Unknown
  Description of Unknown: RightRegion for integrase A832 sequence
aggcaggctgctgagttcaccgcgttgtcgaagaagttccgtcggctggaggcgtcgtgatgtgtgtatgtggacacaaccggtcctggcaccgctactcgtgggacaagttccggcaggtgtgggacaccggatgcaacgccaccaactatcacggtcctgctgggcatgaacgctgccgctgctccaaataccaagacaaggaagacgaatgatcactgatacgagggtcatcactgcgagggacgacgcgaaagccg

SEQ ID NO: 38265 - DNA, 260 bp, Unknown
  Description of Unknown: RightRegion for integrase A833 sequence
aagcaggctgctgagttcacagctctggtcaagaagttccgctggttggaggcttcgtgatgtgcgtgtgtggccataaccggtctttccaccgctaccagtgggacaagttccggggacggtgggacacgggttgtgaagccaccaactatcacggccctgctgggcatgaacgctgccgctgctccaaataccaagacaaggaagacgaatgatcactgatacgagggtcatcactgcgagggatgacgcgaaagccg

SEQ ID NO: 38266 - DNA, 260 bp, Unknown
  Description of Unknown: RightRegion for integrase A834 sequence
ggtctcgtcgcggcggtactggacgacgcggacgagaccggggggcgcgccgatggctgagccccgccgcttcaccgaagccgagatgctggcggccgcggcccgcgccatgggcaagatcgacgcccggggccggcttggcacgtcccgcatcagttacgaggagatcgaggccatggcggccacgctcctcgccctcggggtcgttccgatcccgcccacggccccggcgcccgaccggagcccctattccccgatca

SEQ ID NO: 38267 - DNA, 260 bp, Unknown
  Description of Unknown: RightRegion for integrase A835 sequence
aggcaggctgctgagttcaccgcgttgctgaagaagttccgccggctggaggcgtcgtgatgtgcaggtgtggtcacaaccggtcctggcacaggtatgcgtgggatcggttccgccaagtgtgggacaccagttgtgaagccaccaactatcacggccctgctgggcatgaacgctgccgctgctccaaataccaagacaaggaagacgaatgatcactgatacgagggtcatcactgcgagggatgacgcgaaagccg

SEQ ID NO: 38268 - DNA, 260 bp, Unknown
  Description of Unknown: RightRegion for integrase A836 sequence
aagcaggctgctgagttcagagctctggtcaagaagttccgctggttggaggcttcgtgatgtgcgtgtgtggccataaccggtcccggcaccgctaccagtgggacaagttccggggacggtgggacacgggttgtgacgccaccaactaccacggcccggccgggcatgaacgctgccactgctccgaatatcgagacaaggacgaaaactgatggttgttgatacacgggtgattaccgcgagggatgacgcgaaag

SEQ ID NO: 38269 - DNA, 260 bp, Unknown
  Description of Unknown: RightRegion for integrase A837 sequence
aggcaggctgctgagttcaccgcgttgctgaagaagttccgtcggctggaggcgtcgtgatgtgcaggtgtgggcacaaccggtcctggcacaggtatgcgtgggatcggttccgccaagtgtgggacaccagttgtgaagccaccaactatcacggccccgccgggcatgaacgctgccactgctccaaatatcaagacaaggacgaaacatgatcatcgatacgaaatcccaggcggatatgcggccgatctggcagc

SEQ ID NO: 38270 - DNA, 260 bp, Unknown
  Description of Unknown: RightRegion for integrase A838 sequence
aagcaggctgctgagttcagagctctggtcaagaagttccgctggttggaggcctcgtgatgtgcgtgtgtggacacaacaggtcccggcaccgctaccagtgggacaagttccggggacggtgggacacgggttgtgacgccaccaactaccacggccccgccggacatgaacgctgccactgctccgaatatcgagacaaggacgaaaactgatggttgttgatacacgggtgattaccgcgagggatgacgcgaaag

SEQ ID NO: 38271 - DNA, 260 bp, Unknown
  Description of Unknown: RightRegion for integrase A839 sequence
atagaaatagaacaaaaaccagttagaagaatagggtttcttattgaagagaatgaataattctcttttctttttgtagttctttattaatttatactatgttaaaaaaatgaatattttgttaaaactatgtgactaaatatatattatttattatctcaattttacagttcaagctagaaaatacatcaaaaaaaagatagttgaaaaataaaaataaaaaaattaaaaataactgttataaaaagtgatagttatgt

SEQ ID NO: 38272 - DNA, 260 bp, Unknown
  Description of Unknown: RightRegion for integrase A840 sequence
aagcaggctgctgagttcagagctctggtcaagaagttccgctggttggaggcgtcgtgatgtgcgtgtgtggccataaccggtctttccaccgctaccagtgggacaagttccggggacggtgggacacgggttgtgacgccaccaactaccacggccccgccggacatgaacgctgccactgctccgaatatcgagacaaggacgaaaactgatggttgttgatacacgggtgattaccgcgagggacgacgcgaaag

SEQ ID NO: 38273 - DNA, 260 bp, Unknown
  Description of Unknown: RightRegion for integrase A841 sequence
aggcaggctgctgagttcaccgcgttgctgaagaagttccgtcggctggaggcgtcgtgatgtgcaggtgtgggcacaaccggtcctggcacaggtatgcgtgggatcggttccgtcaagtgtgggacaccagttgtgaagccaccaactatcacggccctgctgggcatgaacgctgccgctgctccaaataccaagacaaggaagacgaatgatcactgatacgagggtcatcactgcgagggatgacgcgaaagccg

SEQ ID NO: 38274 - DNA, 260 bp, Unknown
  Description of Unknown: RightRegion for integrase A842 sequence
aggcaggctgctgagttcaccgcgttgctgaagaagttccgtcggctggaggcgtcgtgatgtgcaggtgtgggcacaaccggtcctggcacaggtatgcgtgggatcggttccgccaagtgtgggacaccagttgtgaagccaccaactatcacggccctgctgggcatgaacgctgccgctgctccaaataccaagacaaggaagacgaatgatcactgatacgagggtcatcactgcgagggatgacgcgaaagccg

SEQ ID NO: 38275 - DNA, 260 bp, Unknown
  Description of Unknown: RightRegion for integrase A843 sequence
aagcagatcgccgaatatcagtcgttgatggtgcggttccgccggctggaggcgtcgtgatgtgcaggtgtgggcacaaccggtcctggcacaggtatgcgtgggatcggttccgccaagtgtgggacaccagttgtgaagccaccaactatcacggccctgctgggcatgaacgctgccgttgctccaaataccaagacaaggaagacgaatgatcactgatacgagggtcatcactgcgagggatgacgcgaaagccg

SEQ ID NO: 38276 - DNA, 260 bp, Unknown
  Description of Unknown: RightRegion for integrase A844 sequence
aagcagatcgccgaatatcagtcgttgatggtgcggttccgccggctggaggcgtcgtgatgtgcaggtgtgggcacaaccggtcctggcacaggtatgcgtgggatcggttccgccaagtgtgggacaccagttgtgaagccaccaactatcacggccctgccgggcatgaacgctgccgctgctccaaataccaagacaaggaagacgaatgatcactgatacgagggtcatcactgcgagggatgacgcgaaagccg

SEQ ID NO: 38277 - DNA, 260 bp, Unknown; identical to SEQ ID NO: 38274
  Description of Unknown: RightRegion for integrase A845 sequence

SEQ ID NO: 38278 - DNA, 260 bp, Unknown
  Description of Unknown: RightRegion for integrase A846 sequence
aagcaggctgctgagttcagagctctggtcaagaagttccgctggttggaggcttcgtgatgtgcgtgtgtgggcacaaccggtctttccaccgctaccagtgggacaagttccgcggcaggtgggacacgggttgtgacgccaccaactaccacggccccgtcgggcatgaacgctgccgctgctcgaaataccaagacaaggaagacgaatgatcactgatacgagggtcatcactgcgagggatgacgcgaaagccg

SEQ ID NO: 38279 - DNA, 260 bp, Unknown; identical to SEQ ID NO: 38274
  Description of Unknown: RightRegion for integrase A847 sequence

SEQ ID NO: 38280 - DNA, 260 bp, Unknown
  Description of Unknown: RightRegion for integrase A848 sequence
aagcaggctgccgagttcacagctctggtcaagaagttccgctggttgggggcttcgtgatgtgcgtgtgtggccataaccggtctttccaccgctaccagtgggacaagtttcgcggcaggtgggacacgggttgtgacgccaccaactaccacggcccagccgggcatgaacgctgccactgctccgaatatcgagacaaggacgaaaactgatggttgttgatacacgggtgattaccgcgagggacgacgcgaaag

SEQ ID NO: 38281 - DNA, 260 bp, Unknown
  Description of Unknown: RightRegion for integrase A849 sequence
aggcaggctgctgagttcaccgcgttgtcgaagaagttccgtcggctggaggcgtcgtgatgtgtgtatgtggacacaaccggtcctggcaccgctactcgtgggacaagttccggcaggtgtgggacaccggatgcaacgccaccaactaccacggccccgtcgggcatgaacgctgccgctgctcgaaatatcaagacaaggaagacgaatgatcactgatacgagggtcatcactgcgagggatgacgcgaaagccg

SEQ ID NO: 38282 - DNA, 260 bp, Unknown
  Description of Unknown: RightRegion for integrase A850 sequence
aagcaggctgccgagttcacagctctggtcaagaagttccgctggttggaggcttcgtgatgtgcgtgtgtggccataaccggtctttccaccgctaccagtgggacaagttccgcggcaggtgggacacgggttgtgacgccaccaactatcacggccccgccgggcatgaacgctgccactgctccgaatatcgagacaaggacgaaaactgatggttgttgatacacgggtgattaccgcgagggacgacgcgaaag

SEQ ID NO: 38283 - DNA, 260 bp, Unknown
  Description of Unknown: RightRegion for integrase A851 sequence
ctctccgagtgcggacggtggggccgattccttgaccgaacccgagagaggtccgcatgacactcgacgcccccgagatccctgacggacagcccacgtgggcgcgtgtgcggcacggcgcaggatgcgccctgccgcgccgcctggacgacggcacgatcggcgtcctgccgaccaccgtcccgatccgcctcgagttcgaccgctacgacaccgggcccgacggcacccgccgccaggtgtggatcgtccctgacggc

SEQ ID NO: 38284 - DNA, 260 bp, Unknown
  Description of Unknown: RightRegion for integrase A852 sequence
actcgcaagcagatcgacgagtggcgccgcgagcgccggctgtgggcggacgcgtcatgaactcgatcaactcgacggtgttcgtgcctggtcacaaccagttgaagcggtgccgcggctgctcggcgctcatcttcttcgccgtgacccgcgacggccggtcgatcccggtcgaccacaagccgcgccccgacgggaatctcgcggtcgcgccgctgcaggacggcgagaaggcgccacgcgcgaccgtcgtccgaccc

SEQ ID NO: 38285 - DNA, 260 bp, Unknown
  Description of Unknown: RightRegion for integrase A853 sequence
acccgcaagcagatcgacgagtggcgccgcgaggtccggctgtgggtggacgcgtcatgaactcgatcaactcgacggtgttcgtgcctggccacaaccagttgaagcggtgccgcggctgctcggcactcatcttcttcgccgtcacccgcgacggccggtcgatcccggtcgaccacaaaccccgtcccgacggcaacctcgcggtcgcgccgctgcaggacggcgagaaggcgccccgcgcgaccgtcatccgcccc

SEQ ID NO: 38286 - DNA, 260 bp, Unknown
  Description of Unknown: RightRegion for integrase A854 sequence
acccgcaagcagatcgacgagtggcgccgcgaggtccgactgtgggcggacgcgtcatgaactcaatcaactcgacggtgttcgtgcccggacacaaccagttgaagcggtgccgcggctgctcggcactcatcttcttcgccgtcacccgcgacggccggtcgatcccggtcgaccacaaaccgcgccccgacgggaacctcgcgatcgccccgctgcaggacggcgagaaggcgccacgcgcgaccgtcatccgacct

SEQ ID NO: 38287 - DNA, 260 bp, Unknown
  Description of Unknown: RightRegion for integrase A855 sequence
acccgcaagcagatcgacgagtggcgccgcgaggtccggctgtgggtggacgcgtcatgaactcgatcaactcgacggtgttcgtgcctggccacaaccagttgaagcggtgccgcggctgctcggcactcatcttcttcgccgtcacccgcgacggccggtcaatcccggtcgaccacaaacccgccgcggacggaaacctcgcggtcgcgccgctccaggacggcgagaaggcgccccgcgcgaccgtcatccgaccc

SEQ ID NO: 38288 - DNA, 260 bp, Unknown
  Description of Unknown: RightRegion for integrase A856 sequence
accacggcatccggccggacaccttcgacccggccgacaggatcatccaggccccgcgcgccgtctgcaggttcaccgcccgccgccagcgctacggaatcagccactagacagcaatagggcccctgaccgtcccaagtcaggggccctaccagccaccagcacaacccgcatactcagaatagaggaggacagagaaaatgaccagatggctacagatcaaagacgattatctcgagctccacgccgaagggatcacc

SEQ ID NO: 38289 - DNA, 260 bp, Unknown
  Description of Unknown: RightRegion for integrase A857 sequence
acccgcaagcagatcgacgagtggcgccgcgaggtccggctgtgggtggacgcgtcatgaactcgatcaactcgacggtgttcgtgcccgggcacaaccagttgaagcggtgccgcggctgctcggcgctcatcttcttcgccgtgacccgcgacggccggtcgatcccggtcgaccacaaaccgcgtcccgacggcaacctcgcggtcgcccctctgcaggacggcgagaaggcgccccgcgcgaccgtcatccgaccc

SEQ ID NO: 38290 - DNA, 260 bp, Unknown
  Description of Unknown: RightRegion for integrase A858 sequence
acccgcaagcagatcgacgaatggcgccgcgaacgccgactgtgggcggccgcgtcatgaactcgatcaacgcgacggtgttcgtgcccggccacaaccagttgaagcggtgccgcggttgctcggagctcatcttcttcgccgtgacccgcgacggccggtcgatcccggtcgaccacaaggcccgcgccgacgggaacctcgcgatcgccccgctgcaggacggcgagaaggcgccgcgcgcgaccgtcgtccgacct

SEQ ID NO: 38291 - DNA, 260 bp, Unknown
  Description of Unknown: RightRegion for integrase A859 sequence
acccgcaagcagatcgacgagtggcgccgcgaggtccggctgtgggtggacgcgtcatgaactcgatcaactcgacggtgttcgtccccgggcacaaccagttgaagcgctgccgcggctgctcggcactcatcttcttcgccgtcacccgcgacggccggtcgatcccggtcgaccacaaaccgcgtcccgacggcaacctcgcgatcgccccgctgcaggacggcgagaaggcgccacgcgcgaccgtcatccgaccc

SEQ ID NO: 38292 - DNA, 260 bp, Unknown
  Description of Unknown: RightRegion for integrase A860 sequence
ctggcggcgttgcacgtcgagcaggagaaacggtacctcctcgccgaagtggatcggctctgccagggcctgggcatcgagcatccagaacaggcggccggcctggaacagctgccgaaaggatggcggcggcagcgtccaatcctcaaggccctggtggaaacgctccaggcggccgcagatagcaagcggaggtaataatgaaggagatccgttcgcagcagatccgccgccggaacaacatgctcagcgagctggcc

SEQ ID NO: 38293 - DNA, 260 bp, Unknown
  Description of Unknown: RightRegion for integrase A861 sequence
ctggcagcgctgcacgtcgagcaggagaaacggtacctcctcgccgaggtggatcggctctgccagggcctgggcattgagcatccagaacaggcggccggcttggaacagttgccgaaaggatggcggcggcagcgtccaatcctcaaggccctggtggaaacgctccaggcggccgcagatagcaagcggaggtaataatgaaggagatccgttcgcagcagatccgccgccggaacaacatgctcagcgagctggcc

SEQ ID NO: 38294 - DNA, 260 bp, Unknown
  Description of Unknown: RightRegion for integrase A862 sequence
gatcgtaaacagtgcgctgagtggcggtccatcatccgcatggaaagggccatcgcatgactgacttgtcgtttctgctagctcccgcagaagaggggcggcatgcgtggcgggacaaagcgttgtgcgcccaggttgatgtgggggacatgtttttccccggtaagggggagagcgcgaagccggcgaagaggatttgcgcccggtgtgaggtgcgggccgaatgcttggagttcgcgttggcgaatcgtgagcactat

SEQ ID NO: 38295 - DNA, 260 bp, Unknown
  Description of Unknown: RightRegion for integrase A863 sequence
caagtggaaatttcagaaacaccattgttcgttgatgatatcggtgatgatgatggttaagaaaaaactatcagaattattaccgaaaaaatttcattcggtatggagagcaactcttaactcggacatactgaatattgtttgtaagggtggacgtggttctggtaaatcatcagatattgcacatattattactcaattgcttatgagatatgctgtcaatgcggttggcattcgatatgttgataatacattagaac

SEQ ID NO: 38296 - DNA, 260 bp, Unknown
  Description of Unknown: RightRegion for integrase A864 sequence
gaccgccggcagtgcgctgaatggcgagtgatcgcccgcatggaaagagctatcgcatgaccatcatcgacctgtcattcatgctcgcccctgttgaggacaagcacgcgtggcgtgaccaagcgttgtgctcccaggtcgatcccgagctgttcttccccgaaaagggagtaaacgcgaaacccgcaaagcggatctgcggtatgtgcgacgtccgggacgaatgccttcagtgggcgctggacaacaacgaacagttc

SEQ ID NO: 38297 - DNA, 260 bp, Unknown
  Description of Unknown: RightRegion for integrase A865 sequence
gaccgccggcagtgcgctgaatggcgagtgatcgcccgcatggaaagagctatcgcatgaccatcatcgacctgtcattcatgctcgcccctgttgaggacaagcacgcgtggcgtgaccaagcgttgtgctcccaggtcgatcccgagctgttcttccccgaaaagggaggaaacgcgaaacccgcaaagcggatctgcggtatttgcgacgtccgggacgaatgccttcagtgggcgctggacaacaacgaacagttc

SEQ ID NO: 38298 - DNA, 260 bp, Unknown
  Description of Unknown: RightRegion for integrase A866 sequence
gaccgccggcagtgcgctgaatggcgagtgatcgcccgcatggaaagagctatcgcatgaccatcatcgacctgtcattcatgctcgcccatgttgaggacaagcacgcgtggcgtgaccaagcgttgtgctcccaggtcgatcccgagctgttcttccccgaaaagggaggaaacgcgaaacccgcaaagcggatctgcggtatgtgcgacgtccgggacgaatgccttcagtgggcgctggacaacaacgaacagttc

SEQ ID NO: 38299 - DNA, 260 bp, Unknown
  Description of Unknown: RightRegion for integrase A867 sequence
gatcgtaaacagtgcgctgagtggcggtccatcatccgaatggaaagggccatcgcatgaccctgacagatttgaccctcaagctcgccgcagcagtggaggaaaagcatgcgtggagagacctggcacggtgcgccgaagtggaccccgaaatgttcttccccgagaagggtggcagcgcgaagccagccaaacggatctgcagccggtgcgaagtcgcggatgagtgcctggagtgggctctggcgaatcgcgagaac

SEQ ID NO: 38300 - DNA, 260 bp, Unknown
  Description of Unknown: RightRegion for integrase A868 sequence
gatcgtaaacagtgcgctgagtggcggtccatcatccgcatggaaagggccatcgcatgaccctgacagatttgaccctcaagctcgccgcagcagtggaggaaaagcatgcgtggagagacctggcacggtgcgccgaagtggaccccgaaatgttcttccctgagaagggtggaagcgcgaagccagccaaacggatctgcagccggtgcgaagtcgcggatgagtgcctggagtgggctctggcgaatcgcgagaac

SEQ ID NO: 38301 - DNA, 260 bp, Unknown
  Description of Unknown: RightRegion for integrase A869 sequence
tattgtgtaaaaatgtgtggtaaagaacgttgtggccatgcattatcatctcctagaaatccttacaatagatattgttttgtagattctgaaggatggattttagaacctggaatccaagaagaagcttgtatatatatgtgttaatattggactaacataaaaattgaatattttaattataaatagtgtcaattaaaatgacaccaaatattattattatcgttgataataaaatggaaaatactaatgcactggaa

SEQ ID NO: 38302 - DNA, 260 bp, Unknown
  Description of Unknown: RightRegion for integrase A870 sequence
tattgtgtaaaaatgtgtggtaaagaacattgtagccatgcattatcatctcctagaaatccttataatagatattgttttgtagattctgaaggatggattttagaacctggaatccaagaagaagcttgtatatatatgtgttaatattggactaacataaaaattgaatattttaattataaatagtgtcaattaaaatgacaccaaatattattattatcgttgataataaaatggaaaatactaatgcactggaa

SEQ ID NO: 38303 - DNA, 260 bp, Unknown
  Description of Unknown: RightRegion for integrase A871 sequence
caatattgtgtaaaaatgtgtggtaaagaacattgtagccatgcattatcatctcctagaaatccttataatagatattgttttgtagattctgaaggatggattttagaacctggaattcaagaagaatcttgtatgtatatgtgttagagctatcaaaaaaaatttgaatattttaattataaatagtgtcaattaaaatgacaccaaatattattattatcgttgataataaaatggaaaatactaatgcactggaa

SEQ ID NO: 38304 - DNA, 260 bp, Unknown
  Description of Unknown: RightRegion for integrase A872 sequence
acccgtgagcagtccatcgagtgggtttcgttcctccgccgctatcggggtgtcgcatgaccacctggaagaaactcaccccggagcagatcgaacggatcgtgtcgttgacgtgggacggatggtctatcgaacagatcgccaccgacattgggtgcacgtcgcgcacggtgacccgggtgagggggaaacacaacatcacccgtgggcgtgctttggatccgatccctgttgaaaagttggctgtcgctgcacgtctc

SEQ ID NO: 38305 - DNA, 260 bp, Unknown
  Description of Unknown: RightRegion for integrase A873 sequence
actcgtgagcagtcgattgagtggatttcgttcatccgccgctacaggggtgtcgcatgaggcggggcgcgaaactcccggagtgggtggtggagcggatcgtggcgttgtcgtggaacggctggaccaccggcgacatcgccaaagaagtcggatgctccgaccgcacagtgtcacgggtgagggtgcggcacggcatcagccgcggcgaagcccacgaccccatccctgaacatgtcctggcccaggcggcccgcctg

SEQ ID NO: 38306 - DNA, 260 bp, Unknown
  Description of Unknown: RightRegion for integrase A874 sequence
actcgtgagcagtcgattgagtggatttcgttcatccgccgctacaggggtgtcgcatgaggcggggcgcgaaactcccggagtgggtggtggagcggatcgtggcgttgtcgtggaacggttggaccaccggcgacatcgccaaagaagtcggatgctccgaccgcacagtgtcacgggtgagggtgcggcacggcatcagccgcggcgaagcccacgaccccatccctgaacatgtcctggcccaggcggcccgcctg

SEQ ID NO: 38307 - DNA, 260 bp, Unknown
  Description of Unknown: RightRegion for integrase A875 sequence
actcgtgagcagtcgattgagtggatttcgttcatccgccgctacaggggtgtcgcatgaggcggggcgcgaaactcccggagtgggtggtggagcggatcgtggcgttgtcgtggaacggttggaccaccggcgacatcgccaaagaagtcggatgctccgaccgcacagtgtcacgggtgagagtgcggcacggcatcagccgcggcgaagcccacgaccccatccctgaacatgtcctggcccaggcggcccgcctg

SEQ ID NO: 38308 - DNA, 260 bp, Unknown
  Description of Unknown: RightRegion for integrase A876 sequence
actcgtgagcagtcgattgagtggatttcgttcattcgccgctacaggggtgtggcatgaggcggggcgcgaaactcccggagtgggtggtggagcggatcgtggcgttgtcgtggaacggttggaccaccggcgacatcgccaaagaagtcggatgttccgaccgcacagtgtcacgggtgagggtgcggcacggcatctcccgcggcgaagcccacgaccccatccctgaacatgtcctggcccaggcggcccgcctg

SEQ ID NO: 38309 - DNA, 260 bp, Unknown
  Description of Unknown: RightRegion for integrase A877 sequence
actcgtgagcagtcgattgagtggatttcgttcatccgccgctacaggggtgtcgcatgaggcggggcgcgaaactcccggagtgggtggtggagcggatcgtggcgttgtcgtggaacggctggaccaccggcgacatcgccaaagaagtcggatgctccgaccgcacagtgtctcgggtgagggttcggcacggcatctcccgcggcgaagcccacgaccccatccctgaacatgtcctggcccaggcggcccgcctg

SEQ ID NO: 38310 - DNA, 260 bp, Unknown
  Description of Unknown: RightRegion for integrase A878 sequence
tgccatttccttggagatttttacttgtgatttagtcattggaatcagtcctgttaaggctccccaccacaatggctaaaaggtacaggacagaccggggagcacgttaagtataaccacttcaaaataattaaacaaatggcttgattttacccgattcagtgactaagattaattcaacttaaacaggaaggataatcatgaaattcaccgacacaccaacaaccacgcttgatgagttacttaactcaacgcgtggc

SEQ ID NO: 38311 - DNA, 260 bp, Unknown
  Description of Unknown: RightRegion for integrase A879 sequence
agagaagataagggttatggttatattgaaaagttattagcaatagttaaagagagtcgacagaagaatgaggaaactatgaaaagatacaacacaataaaaaaattgatcttttgatagtctgttatatccttttcatatctattgtgattgataagtaaagtgaccctttttaactataactttttataataaaattcatgtcgaaatccattttttctaaggagatggatgcatttgccattgatattctgattaga

SEQ ID NO: 38312 - DNA, 260 bp, Unknown
  Description of Unknown: RightRegion for integrase A880 sequence
tatgatgtggctgtttccacgctttataagaagtttccggcgtcatcatttcaatcctaaaccttggtttaagagaactcggtaccagcggtgaaaagatccccctgttgagcacggctaacacatggagttcacgccagactttcaacggcgggatcaccggggcgctggcagggaatgccgatactgcaacgaaattgaaaaccaaaaggtcgcttcaagttgacctccaaagtgataacgccatcgactttgatggt

SEQ ID NO: 38313 - DNA, 260 bp, Unknown
  Description of Unknown: RightRegion for integrase A881 sequence
acggtggcactttctgcatctcatgccttgaaaatggaagctctccagagtttagcatagccaaaagaaaatgattaaatttacagcgcaggagcgggagatgcaaatctcccatctgtgtaaggatagcctttactctttttctgggtgggatggtccttacaagtttggcaaatcaaaagtgctcatctcctgtaaaaagcatggttgtcattctttgcatctaaatagtgttctacacaatggttcaagatgtccgg

SEQ ID NO: 38314 - DNA, 260 bp, Unknown
  Description of Unknown: RightRegion for integrase A882 sequence
cttctaaatgggatactcaaagaagagaaggaagttgaaagcaatatcccacaatggcagacggacgcccttaaaactttagtgaagatgggagtcatcacagatgaagcctactggtctaaaaagatggaagacaaaattactgtcggtgaggtcatcggattactcggtaaaatgactaagtaaatggaggggtgtcgatggatacgtttgaaagtgaacttacacttgatatgataagtgaagggatgtaccgtgac

SEQ ID NO: 38315 - DNA, 260 bp, Unknown
  Description of Unknown: RightRegion for integrase A883 sequence
ggtgatgcggaacaaaagacaccgaatccgcagtcagacgcagacgagtacaagaaatgaaacaggtagaaatcaaaccaatcaaagagacgagcgacgattacgaggagctggtcgaaatcatttcggattacttcaaagaggaaatctatttgcctcttttgaaaatcattgatgctccgaaatcggttttgaattctcgcgaggatttgatttctgcaatttcttctggacgtatcacttattatcgcggagagttt

SEQ ID NO: 38316 - DNA, 260 bp, Unknown
  Description of Unknown: RightRegion for integrase A884 sequence
ctggagggacagatgagccttctcgactacggcgacgagccggaaaacactacgttctaagacaacatttctaagaagcagtacatatataaggttcctgaaagggacggtaaaataagactatgagcatagctcatagtcttatttttatatccaaaggaggacaccaaacatgagcatggagatcatccagagcgcggcgaccgagctgctggtcaacgttgcgctcgccgtgctggccctcgccggggcctacgcgg

SEQ ID NO: 38317 - DNA, 260 bp, Unknown
  Description of Unknown: RightRegion for integrase A885 sequence
ggatccaacgcgcgcttgatccgatagaaaaccgagacgccagggttgtaccaggtcgaatcctcaccgagacgtgtaaacccagcgagcgagttggaactcatactctgcgcaaccaacccgaccacgggccttgaccccgcgggttggacacgcttgatcctggtctcagaccagggaaagcgagaagatctaacccgatggcaaagaaaaattactccgaagagttccgccgcgacgcagtcgagctgtaccgcgac

SEQ ID NO: 38318 - DNA, 260 bp, Unknown
  Description of Unknown: RightRegion for integrase A886 sequence
cgtagatcacgagataataagaaaaatatattggataatcaaccggaaattaatatgtaatatattggaaaaattgataaatttatttattataaaattataacaaataaataataatattattaaccaaatggaatgttatgaatgtggtaatatgagtactaacattgtattatattataatatcaaacttaaaatatatatcggatcagaaaattataataataataatcatcaaaattttaaaccaatttgtgaaa

SEQ ID NO: 38319 - DNA, 260 bp, Unknown
  Description of Unknown: RightRegion for integrase A887 sequence
tatcgcacgtaataaccgctttgtctacttgtttccagagatgtatgctaacatcggaaatataaaaatggtagaactcggatacgggcatagcgtacaaaaggtcttttattacgacccaaacacgtgtgcatattgtttgtttacgttcaccaataaaagtaacatcgtgaatctattcgaagctaaaaggtaagaaaatgggtaaacgttggacagataaagaagatgaaacgttgctgcttattcttagtacatca

SEQ ID NO: 38320 - DNA, 260 bp, Unknown
  Description of Unknown: RightRegion for integrase A888 sequence
ataaaataccacaatttgaaggatttttcaaagtatacttgaatcaattatcagaaaaaaattatcacgaatattgttttacagataatgaaggatatattttacaaccaggtatcaaaagagaatatattaattaaaaaaattgaaattttaaagattaaaattgtttattaatcctattttattattatagctccatcatggagaaagttattattatttatcatgagcatttgaattcttttgaagaatctgcagtc

SEQ ID NO: 38321 - DNA, 260 bp, Unknown
  Description of Unknown: RightRegion for integrase A889 sequence
ccatgcattggcatctcctagaaatccttacaatagatattgttatgttgattctgaaggatggattttggaacctggtatacaagaagaagcttgtatgtatatgtgttaatattggactagcataaaaattgaatattttaatcataaataatatcatttgaaaatgttttattatcaatattattattgataataaaatggaaaatcctacaacgctagaaattaatgccgctattatattggttaaattgcgtcgt

SEQ ID NO: 38322 - DNA, 260 bp, Unknown
  Description of Unknown: RightRegion for integrase A890 sequence
aggaaacaaattaatacttggtttcaaaataaacgctcatacggcaaacaacaaaaatgagcagtaaaaaattgattattatatgttaatatatatattgacatattataaaaaatcattaaacatatcataataaaatggaatgttattattgtgaaactaataaaaataatatatgtttttattatggtcttaaacctattgtttatttagaaagtaaacattataatccacaaattcataaaaattataaaccgata

SEQ ID NO: 38323 - DNA, 260 bp, Unknown
  Description of Unknown: RightRegion for integrase A891 sequence
gctttaaggcgagttttcgaatcttaagtttatctttctgtttctgctcctctcgtcgtcgtttcttctctgctgccttttccgctttttcgcgttctttgcttcgtcgttcgagtgctatcttggtttgaagtggcacactgaatttggccacctgaacagaggtgatatgctcacctcagaacaacacaggtgctccaatgaaaaaaagaaattttagcgcagagtttaaacgcgaatccgctcaactggttgttgac

SEQ ID NO: 38324 - DNA, 260 bp, Unknown
  Description of Unknown: RightRegion for integrase A892 sequence
gttcgaacgatactaaatgaatatgctttggatcagaaccagctcgcgttgtttgactaacgcgagcttatttattgcaagcgactattttacctcggtgtttcaaggaaaaaatgaatattatgcgtatgtaggaaaatttttctatgggttaagcttctgtcagatagtaatgacaggagcttttttattttgcttgattagggggtggaatcagttggaatgggaacaagcatttaacatcatcatcatgacgatga

SEQ ID NO: 38325 - DNA, 260 bp, Unknown
  Description of Unknown: RightRegion for integrase A893 sequence
aatgcggctttctacgatcaaaatcgtagacagtttagccccggatgcactcgtactcattctcaactggcgctagcacaaggttttaccactcccattaattaaattttttaatcacataaaatttttcatgtaattaaaaaaaaattgatttttgaatgattaaaataacacatttattaaaatttaataataatacaatgaataaaatcattattatatattgcaatcattttgattcttttgaagaatcggttgtc

SEQ ID NO: 38326 - DNA, 260 bp, Unknown
  Description of Unknown: RightRegion for integrase A894 sequence
ttatgaaagattgggtttacttctacattgagcatactattaaatatggtaagccgtatcgacaaagaaggaattaaatataagaagtgcggtgtagtgctgacctgtttagagccaaagtatggacatacttatgatgtgtgctgaaaaaacaggaggttttaacttggtaaactaaacacactcatcaggagtttaccatgagcaagaaacacaagacttacaccacagaatttaaagctgaagccatcaaattaatt

SEQ ID NO: 38327 - DNA, 260 bp, Unknown
  Description of Unknown: RightRegion for integrase A895 sequence
gccaaccccaaggcaggtattaccgcgcatctctagtgtcatcttaaccccttccgggtaagaataattaccgcccaatactacaacctggctgacggggtactggctggaattattgttaaaattagagttaataatgaatcgccacaggtttaacagacacctcagagtcatttaagatgacttaaagagaggtgcccatgagcggtaagcgttatcccgaagagtttaaaattgaagcggtaaaacaggttgttgat

SEQ ID NO: 38328 - DNA, 260 bp, Unknown
  Description of Unknown: RightRegion for integrase A896 sequence
gaaataacgccggatgagcagaaagaacctgtggcggccattgcgccgtctttatattagcgccagcgtatcagttccgacaaaacaatctcaatccatcccaataattagcagggagaacaatcgaaaaagcgcaagagaaagaaggattacttgtttttttaggaatgaaatccgttaatgactatactcttaatattcttggccaaaatgtttcaagagtcacaacggggaaaaaaccgtatgatttattattcctg

SEQ ID NO: 38329 - DNA, 260 bp, Unknown
  Description of Unknown: RightRegion for integrase A897 sequence
atcaacttcgctgatggccgattcgcaatgatgcgcggcgagccgatgctcgacgcctccgacggagtcctgacgatcgcactcgatgacggcacgttccggacgtgcaacttcgaccacgtcgtctactacaccaccctcaccgaggacgacctcaagcacctcttcggtgatgacgaggaagaaggagccggatacctgtgaacgcaacagaactactggatcagctccgcgagaaggtcgaagccctcgaggaggag

SEQ ID NO: 38330 - DNA, 260 bp, Unknown
  Description of Unknown: RightRegion for integrase A898 sequence
aaaaaatacaatgagatatgtggtcttctaaatcaggcgataaaacaaatgccagaatagattagcaaatcatcggattttgttacgacaaattaatgaaaaaaaagatggtagttattacttgcgaagatctcgctaaaatgcttttagagcttcctgattctgcaaaacccaaagatatagaatcaaaattgtttaatcaaaaaggtatcgaaaaaaaccagacggccaagtacatccacagctgtgtttgcaaaatg

SEQ ID NO: 38331 - DNA, 260 bp, Unknown
  Description of Unknown: RightRegion for integrase A899 sequence
gaaatgcaattagatatcctaaagcaagcggcggtgattatggcacaaaaagggaaataatcactgctaataaggataactatagcatttcagccatgtgtcgttggttgaacattcctcgttctagctattactacaaggctgttaaaccagtctctgaagcggaaacttgaagaaaatatcaaagctatttttctcgaaagtaaggccagatacggatccagaaaaatcaaaatatgcttgaataacgaaggtattac

SEQ ID NO: 38332 - DNA, 260 bp, Unknown
  Description of Unknown: RightRegion for integrase A900 sequence
gtatccgcttctgcgcttgcaaaatggatcaaacagtattctcaagtcagactcgaagataattctgtacttactgccaagcaaatacaagagttacaaaaacgtaatgcgcagcttgaagaggagaaccttgaatcggttacactaaactagacagaatttataaagtgttctacactaaagaaaacaggagaacagatatgtctagaaaaatacgtcgccacttcaccgatgattttaagcaacaaatcgttgacttg

SEQ ID NO: 38333 - DNA, 260 bp, Unknown
  Description of Unknown: RightRegion for integrase A901 sequence
tactggacgccccgggccaaggacgagcccaagatagaactgtccgaggatcagggctagtcacccccacgagcctgccgcagccagcggcaggctttccccttgcgccgatccttgcgcccaaggtaggctacctatcccgacacgccgacgtcgtacttccctaacccggggtagtacgatgttcgcatgagtgctacccccgaagcccccgcagttgccaccgagtccgagtggggcagcccgacgttcaaaacgtt

SEQ ID NO: 38334 - DNA, 260 bp, Unknown
  Description of Unknown: RightRegion for integrase A902 sequence
gcccggaaactagccttgtcccggcagcgggttagtgaaataattaagaagtttgcgtaacccactccctaacccgtctcccaagcgggttttttgattcctaaattctttcctcaaaccccttgacatcctaaaggaggtttgatatattagaagtatgaacttgaggagaacgtttatgtttatagttaaagaagggaacagaaagcacggtgttggctaccagatatgggaaggaaacttgttggtacgcgttggta

SEQ ID NO: 38335 - DNA, 260 bp, Unknown
  Description of Unknown: RightRegion for integrase A903 sequence
atcgctcaaggggcaccggaggcgttacgccgggaagcggtcgaactgctgttgaagtaatcaggggagcacaacaggatgatacaactacctccagcgttggaggctatgaaagccttcccgcaattcatgatttacaagctcgtaccgcgtcagggcacaccgggtaagatggacaagctgccgtgcagtctcgacggcaaacccgtgtcagcgcacgcctcagagcactgggttgacgctgacacagcttgtttcac

SEQ ID NO: 38336 - DNA, 260 bp, Unknown
  Description of Unknown: RightRegion for integrase A904 sequence
ttcaacaaaattttgtattttcctgaatttgacctctttccgtaatatttgtttttgtaaggggctttctaagaccccacctaatttaaaactccacaaaccttattttaattttacaaaaaaatggatgggctacactaagttggacagaaaaattaaggctagtagaataacatattattatagggaacggatctattatgccaagacaaagacgtacattcacagatgatttcaagagacaaatggtccaacttcac

SEQ ID NO: 38337 - DNA, 260 bp, Unknown
  Description of Unknown: RightRegion for integrase A905 sequence
aacgaaccaaaggtagatatccaagaggttatcgatgccattaataaagtccgactataagtttcgtatcctgttcaaatacgaacatgggtacaactacctaatggaagacaaagcctatttaatttttggtgtcatcaaataccaaggcgtcaagttatttatgcgtcgtccaaaggaaattcgcatcgaccctaactacccaattagtgtggatgaggaggctagagacttattcaagcaaatgtctttcgcttgtc

SEQ ID NO: 38338 - DNA, 260 bp, Unknown
  Description of Unknown: RightRegion for integrase A906 sequence
atccttcaactgagggattttgcttatgttaataaaaacgggtatatttattattgtaattaaattgaattgaatggaggctttctctcatgagcagaattaatgaagtaagagaatttattgaaaagctgatgctagtatagttccatggacacaacttagttaagtgttaaaatgttactaagaaaggttgtgtccatatgggaaacaaaaatacaggcaaaaaatataacgaagattttaaaaagatgatcgttgat

SEQ ID NO: 38339 - DNA, 260 bp, Unknown
  Description of Unknown: RightRegion for integrase A907 sequence
catgaagaacgtcgctgtgcgcgtccacctggacaacggactgatcgccgctgggaccggcgaggtcctgttcgagccctcggagggcgcggtctacgtcatgggcaacgacggtgctcacaccgtcttcaacttcgaccacatcacccactacgtcgtggtgccggtcgatgacgagaaggaacaggagggattccgaattggctgagacgccaacgcttctgagggttctcgatgagatcgaggacatcctcgcggag

SEQ ID NO: 38340 - DNA, 260 bp, Unknown
  Description of Unknown: RightRegion for integrase A908 sequence
ggaatccatgaagaacgtcgctgtgcgcgtccacctggacaacggactcatcgccgcaggaaccggcgaggtcatgttcgagccctcggagggcgcgatctacgtcatgggcaacgacggtgctcacaccgtcttcaacttcgcccacgtcacccactacgtcgtggttccggtcgatgaagagaaggaggggttccgaattggctgagacgccaacgcttctgagggtgctcgatgagatcgaggacatcctcgcagag

SEQ ID NO: 38341 - DNA, 260 bp, Unknown
  Description of Unknown: RightRegion for integrase A909 sequence
agaggaacacatgcagaactgcactgtccgcgtccacctggagaacggcttgatcgccatcggccagggggaggtcatcttccagcccgacgagggcgctctgtacgtgctcggtgacgacggtgcccacaccgtcttcaacttccggcacgtcagccactacgtgatcgtccccaacgacgagaaggaggggacctcaattggctgagaccccaacccttctcagggtcctcgacgagatcgaggacatcctcgcggag

SEQ ID NO: 38342 - DNA, 260 bp, Unknown
  Description of Unknown: RightRegion for integrase A910 sequence
aacacacatgcagaactccatcgtccgcgtcttcctggagagcggcctggtggccgtcggccagggcgaggtcatcctccagcccgatgagggcgctctgtacgtgatcggtgacgacggtgcccacaccgtcttcaacttccggcacgtcacccactacacgatcaccccgaacgaggagaagaacgaggagccctcaattggctgacacctcaacgcttctgaaggttctggatgagatcgagggtctcatcgaggag

SEQ ID NO: 38343 - DNA, 260 bp, Unknown
  Description of Unknown: RightRegion for integrase A911 sequence
ggaacacatcatgcagaacgcatcagtacgagtccacctggagaacggcctggtggctgttggctcgggtgaggtcatccttcagcccgacgagggcgctctgtacgtgctgggcgacgaaggcgctcacaccgtcttcaacttccggcacgtcacccactacgtcgtcgtcccgaaccaggacaaggagggcacctcaattggctgagacgccaaaccttctcagggttctggacgagatcgaggacatcctcgcggag

SEQ ID NO: 38344 - DNA, 260 bp, Unknown
  Description of Unknown: RightRegion for integrase A912 sequence
agaggaacacatgcagaactccactgtccgcgtccacctggagaacggcttgatcgccatcggccagggcgaggtcatcttccagcccgacgagggcgctctgtacgtgctcggtgacgacggtgcccacaccgtcttcaacttccggcacgtcagccactacgtgatcgtccccaacgacgagaaggagggaacctcaattggctgagacgccaacgcttctgagggttctcgatgagatcgaggacatcctcgcggag

SEQ ID NO: 38345 - DNA, 260 bp, Unknown
  Description of Unknown: RightRegion for integrase A913 sequence
tttacctttttcttcataacttccccaggtatcgttaattttgtggattgtgttatatcttgtcatttccttaacctcatactgttatttatataggaccaatagccctagtattgttgtctggatgtatactataaaagtagacaaaactttgtgtgttataatctattttaaaagacacaaaaacgaaaggacaacctatgtcaacatttaaacgctacgatgaagaatttaaacaatcccttgtcaacctttatcaa

SEQ ID NO: 38346 - DNA, 260 bp, Unknown
  Description of Unknown: RightRegion for integrase A914 sequence
aaaagacgaagaaagcagatagctctggaagcgtcatactcatatcacgggagaccttaaaaggctattgaagctcgccctatattcttgctgatactacgaggaggtgagaactatgggcgaaaattctaaacttaactggcgagtgcggtttgccaaccctacttggtgggtgttagcgggaatccctcagttgattcttattgttcagctgatcttaacttttgtaaacgattttgtttaccctacgggatatcaga

SEQ ID NO: 38347 - DNA, 260 bp, Unknown
  Description of Unknown: RightRegion for integrase A915 sequence
caggttacgttgatattgatcctattttatctactattagtgaatctatcaaaaaacaatatacaaatctccaaataccaatgaattaatttcatcaaataaaattgattttaaaatgtattagtagatctcaatatcattattaatgatactaagataattacttcatagtaaaaaatcttattagatagaaaattagtatgagatctttatattccacttgtgatgtaaaaatacctattcaaaaatggaaaaatact

SEQ ID NO: 38348 - DNA, 260 bp, Unknown
  Description of Unknown: RightRegion for integrase A916 sequence
caggttacgttgatattgatcctattttatctactattagtgaatctatcaaaaaacaatatacaaatctccaaataccaatgaattaatttcatcaaataaaattgattttaaaatgtattagtagatcttaatatcattattaatgatactaagataattacttcatagtaaaaaatcttattagatagaaaattagtatgagatctttatattccacttgtgatgtaaaaatacctattcaaaaatggaaaaatact

SEQ ID NO: 38349 - DNA, 260 bp, Unknown
  Description of Unknown: RightRegion for integrase A917 sequence
tgaagcggcacgagctgtcctgccgaacatgactaactcaccgatggtcgtcaccggcaatcaccgagcgtggcgcaacgtgatcaagcagcggtggcacacggcagcggacgccgagattcgggagctggcaggggagttgctgaagcagctacggcaggtcgctcccaacacctaccaggacatccccgaggagccgtatggctgacgtgcgggaggtagctgacctgctcaaccggctcaacgtcattgtgcgggag

SEQ ID NO: 38350 - DNA, 260 bp, Unknown
  Description of Unknown: RightRegion for integrase A918 sequence
tgaagcggcacgagccgttctcccgaacatgaccaactctccgatggtcgtcactggcaaccaccgtgcatggcgcaacgtgatcaagcagcgctggcacaaggcagcggacgccgagattcgggaactggccgggatgctcctccaggagctccggaagatcgcaccgaacacctaccaggacatccccgaggagccgtatggctgacgtgcgggaggtggcagatctgcttaataggttgaacaccattgtgcgggaa

SEQ ID NO: 38351 - DNA, 260 bp, Unknown
  Description of Unknown: RightRegion for integrase A919 sequence
tgaagcggcacgagctgtcctgccgaacatgaccaactcaccgatggtcgtcaccggcaatcaccgagcgtggcgcaacgtgatcaagcagcggtggcacacggcagcggacgccgagattcgggagctggcaggggagttgctgaagcagctacggcaggtcgctcccaacacctattccgatattccagaggagccgtatggctgacgtgcgggaggtagctgacctgctcaaccggctcaacgtcattgtgcgggag

SEQ ID NO: 38352 - DNA, 260 bp, Unknown
  Description of Unknown: RightRegion for integrase A920 sequence
tgaggctgcccgagcggtactgccgaacatgaccaactcaccgatggtcgtcaccggcaaccaccgggcgtggcgctacgtcatcaagcagcgctggcacaaggcagcggacgctgagatccgtgaactggcagggcttctgctgtcggagctgcgggagatcgctcccaacacctatcaggacatccccgaggagccgtatggctgatgtgcgggaggtagccgacctgttgaaccgtctgagcacgattgtgcgggaa

SEQ ID NO: 38353 - DNA, 260 bp, Unknown
  Description of Unknown: RightRegion for integrase A921 sequence
tgaagcggcacgagccgttctcccgaacatgaccaactctccgatggtcgtcactggcaaccaccgtgcatggcgcaacgtgatcaagcagcggtggcacacggcagcggacgccgagattcgggagctggcaggggagttgctgaagcagctacggcaggtcgctcccaacacctaccaggacatccccgaggagccgtatggctgacgtgcgggaggtagctgacctgctcaaccggctcaacggcattgtgcgggag

SEQ ID NO: 38354 - DNA, 260 bp, Unknown
  Description of Unknown: RightRegion for integrase A922 sequence
tgaagcggcacgagccgttctcccgaacatgacggactcaccgatggtcgtcactggcaaccaccgggcgtggaggaacgtcatcaagcagcgctggcacatggcagcggacgccgagatccgtgaactggcagggcttctgctgtcggagctgcgggagatcgctcccaacacctatcaggacatccccgaggagccgtatggctgatgtgcgggaggtagccgacctgttgaaccgtctgagcacgattgtgcgggaa

SEQ ID NO: 38355 - DNA, 260 bp, Unknown
  Description of Unknown: RightRegion for integrase A923 sequence
tgaggctgcccgagcggtactgccgaacatgaccaactcaccgatggtcgtcaccggcaaccatcgagcgtggcgctacgtcatcaagcagcgctggcacaaggcagcggacgccgaaatccgggaactggcagggcttctgctgtcggagctgcgggagatcgctcccaacacctatcaggacatccccgaggagccgtatggctgatgtgcgggaggtagccgacctgttgaaccgtctgagcacgattgtgcgggaa

SEQ ID NO: 38356 - DNA, 260 bp, Unknown
  Description of Unknown: RightRegion for integrase A924 sequence
tgaagcggcacgagctgtgctgccgaacatgaccaactcaccgatggtcgtcaccggcaatcaccgtgcatggcgagacgtgttgaagaagcggtggcacacggcagcggacgccgagattcgggagctggcgggagagttgctgaagcagctacggcgggtcgctcccaacacctaccaggacatccccgaggagccgtatggctgaagtgcgggaggtagctgacctgctcaaccggctcaacgtcattgtgcgggag

SEQ ID NO: 38357 - DNA, 260 bp, Unknown
  Description of Unknown: RightRegion for integrase A925 sequence
cgagttagctccaaaaaacaaagcgaacatttcgaacatcagatcgaattctgcaaataatactatccagattacacagttattacagatattttttcgggaattaattttaacagaaaaggtatacagatcgttttggaatcggcgatgcgcggagatctcgaagaacttgtggttgcctacaaagatagactgtgtagattcggttacgaacttatcgaattgatcgttggaagatacggtggacgaatcgtcgtttt

SEQ ID NO: 38358 - DNA, 260 bp, Unknown
  Description of Unknown: RightRegion for integrase A926 sequence
acgagccgttctcccgaacatgaccaactctccgatggtcgtcactggcaaccaccgtgcatggcgcaacgtgatcaagcagcgctggcacaaggcagcggacgccgagattcgggaactggccgggatgctcctccaggagctccggaagatcgcaccgaacacctaccaggacatccccgaggagccgtatggctgacgtgcgggaggtggcagatctgcttaataggttgaacaccattgtgcgggaactggtttca

SEQ ID NO: 38359 - DNA, 260 bp, Unknown
  Description of Unknown: RightRegion for integrase A927 sequence
acttttgactaaaaaaagtgagatgtgaatcacggacataaaaccataattttcgatgtcatggttccaattaaatttgattgttatcgtatggaagcttggggcggagtaggcgtcatctggtcgttctggtagaagaattgcgcgaacgcagcgttaatttccgcagcctgacagattccatcgataccagtacaccaatgggacgtttctttttccatatcatgggcgcactcgctgaaatggaacgtgaattaatt

SEQ ID NO: 38360 - DNA, 260 bp, Unknown
  Description of Unknown: RightRegion for integrase A928 sequence
ccaaacgttattcttatcgaaaatgtcggtgatgaatatttttataaattgatgaagtaggaaagaaatgaagaatattaattttagagcgtggaacaatgagctaaagcgttacttctatatgaaagacgaaaacagcttaatgatcgcagaaacaaactgcacagttgcaatgtggtgtagcgatggaatatttgatgaatgtgatgccgatgaagttgaattagcaatagggatgaaagactttgacggtaaagaca

SEQ ID NO: 38361 - DNA, 260 bp, Unknown
  Description of Unknown: RightRegion for integrase A929 sequence
gaagaggagaaccttatcttaaaaaaagcaagtgccatattcatgcaaaacttaaagtaagactcctcgctgtctatcggttacgctttgaacacgccacaacaatcttgtgtcgtgttttacgtgtcaatcgctccacttactataaatttctaaaacataagccctcaaaaagagatttggataatcaaatttatagaaaacaaatacttgagatttataccaaagcaaacaaaagacttggtgcgaagtctatcaag

SEQ ID NO: 38362 - DNA, 260 bp, Unknown
  Description of Unknown: RightRegion for integrase A930 sequence
tcgctgtctgaggagaacgaaatcctaaaaaaagccctaggctttcttgcgcagaagtaaccaatatctttgattacattcaccaagaaagccatcaccaccaggtaaccaagatgtgccgaatcctcggtgtttccagagctcagtattatcgttatcgatcccccaaaccttcaaaacgccgggccgaagatgcggacttgaaacaacggattctgcggatctttgcggaatttaagcagcgatacggtgttatgaag

SEQ ID NO: 38363 - DNA, 260 bp, Unknown
  Description of Unknown: RightRegion for integrase A931 sequence
cgaagcggcgcgagccgtcctgccgaacatgaccaactccccgatggtcgtcaccggcaaccaccgagcgtggcggtacgtcatcaagaaccgctggcacgaggccgcggatgccgaaatccgtgaactggcaggggaattgcttcggcagctccgggagatcgctcccaacacctaccaggacatccccgaggagccgtatggctgacgtgcgggaggtagccgacctgctcaaccggctcaacgtcattgtgcgggag

SEQ ID NO: 38364 - DNA, 260 bp, Unknown
  Description of Unknown: RightRegion for integrase A932 sequence
tgaggctgccaggtcagtcctgccgaacatgaccaactcaccgatggtcgtcactggcaaccaccgtgcatggcgcaacgtgatcaagcagcggtggcacacggcagcggacgccgagattcgggagctggcaggggagttgctgaagcagctacggcaggtcgctcccaacacctaccaggacatccccgaggagccgtatggctgacgtgcgggaggtagctgacctgctcaatcggctgaacacgattgtgcgggag

SEQ ID NO: 38365 - DNA, 260 bp, Unknown
  Description of Unknown: RightRegion for integrase A933 sequence
tgaagcggcacgagctgtcctgccgaacatgaccaactcaccgatggtcgtcaccgggaatcaccgggcatggcgcaacgtgatcaagcagcggtggcacacggcagcggacgctgagatccgtgaactggcagggaaattgctgcggcagctacggcaggtcgctcccaacacctaccaggacatccccgaggagccgtatggctgatgtgcgggaggtgtccgatctgctcaaccggctcaacgtcattgtgcgggag

SEQ ID NO: 38366 - DNA, 260 bp, Unknown
  Description of Unknown: RightRegion for integrase A934 sequence
tggattcccaacaagatacccttgtttaaatgttgatatatactttccgtaattatgtattgcacgaacatcagccatatccttatcttgtctacgctctgtcaaagacacttcgtggttgtggatgtatactataaaagtagacaaaactttgtgtgttataatctgttttaaaagacacaaaaacgaaaggacaacctatgtcaacatttaaacgctacgatgaagaatttaaacaatcccttgtcaacctttatcaa

SEQ ID NO: 38367 - DNA, 260 bp, Unknown
  Description of Unknown: RightRegion for integrase A935 sequence
aggttacgttgatattgatcctattttatctactattagtgaatctatcaaaaaacaatatacaaatctccaaataccaatgaattaatttcatcaaataaaattgattttaaaatgtattagtagatcttaatatcattaataatgatactaagataattacttcaaagtaaaaaatcttattagatagaaaaattagtatgagatctttatattccacttgtgatgtaaaaatacctattcaaaaatggtataatatc

SEQ ID NO: 38368 - DNA, 260 bp, Unknown
  Description of Unknown: RightRegion for integrase A936 sequence
ggaggtggattgtgagtgaattaattaaggttttggatggtggtgatttccgtgatcgttggaatgagctttgtatcaagctagaagattatgaaaacatcaattgtgataattacgaacaagagctccatgatttatttgaataccacagctttaaatttgatgaatcaaagcacgaatattgggaaatcgaataatgagtgaagttaaagcggaaagtaaggaggggtgaaatgacaaaaacatccatagatcaagaa

SEQ ID NO: 38369 - DNA, 260 bp, Unknown
  Description of Unknown: RightRegion for integrase A937 sequence
atcgctgaacagatgggcgtgagccgtgcaaccctttaccgcaatttggagaccgcataatgagcgccaagccgctaaccgccgccgaggctaaatgggtgaaggacttgcagacccttctgaacaagtgcccatccaagcgaatggtcgccttcacgattggcgatcccatggtggttatctatgactcctcattttctggcgagatagatgacatcatgaaccgctcaaacaaggatgtgtgccaagtcgtgacagcc

SEQ ID NO: 38370 - DNA, 260 bp, Unknown
  Description of Unknown: RightRegion for integrase A938 sequence
ctttttgatgttagcatttccactctttacaagaaattccctgtaaatcagtcgcgttgaaagtggcgatattgtaccagcactgacacatcgtgaaatgcgtgcgccgcacgcctggcaaccagaacataaggtatccctgtcaaccggagagactgccttatggctcaggattaccaccacggggtgcgcgttgttgaaatcaacgagggcacccgacctattaccacggtgagcactgccatcgtgggcatggtctg

SEQ ID NO: 38371 - DNA, 260 bp, Unknown
  Description of Unknown: RightRegion for integrase A939 sequence
tttcacgaaccccattcagaaacgaatgcactccgccaaagatagataaaaataaaattgttaagtcagacataaaaaccttgccaattttgagttgttcgtcattggggaacggtatgtactttgtgatttccatacatactggtttttgttaattaaaatccgcagcttgctataaataacgatagtgagcagaaaatatgctaataggctatgtacgcgtatcaacaaatgaacaaaacactgctttgcaacgaaat

SEQ ID NO: 38372 - DNA, 260 bp, Unknown
  Description of Unknown: RightRegion for integrase A940 sequence
cctctgcggcctcttgtgggatagagatttttttagtcatgggaatcagtcctgttaaggctccccaccacaatggctaaaggtacaggacagaccggggagcaagttaagtataaccacttcaaaataattaaacaaatgacttgattttacccgatctagtgactaagattaattcaacttaaacaggaaggataattatgaaattcaccgacacaccaacaaccacgcttgatgaggtacttatctcaacgcgtggc

SEQ ID NO: 38373 - DNA, 260 bp, Unknown
  Description of Unknown: RightRegion for integrase A941 sequence
cattggcgaaactgcaaattattttggcggtttgggtggaagcaatccccatcaaagctacacgctaacgttcagttttttatctttggattcacaaagtgtaacggtcgatacagccttaggttgttcaatcaagagcttagtttttactactagaagacggcaacctcttaaattcaacttaaacaggaagactaatcatgaaattcacagacacaccaaccactacgcttgatgaactgctcatctcaacgcgtggc

SEQ ID NO: 38374 - DNA, 260 bp, Unknown
  Description of Unknown: RightRegion for integrase A942 sequence
ggtgtggcacgttttgttttttacattctttattgcacataatattcagtcctgttaaggctccccaccacaatggctaaaggtacaggacagaccggggagcaagttaagtataaccacttcaaaataattaaacaaatgacttgattttacccgattcagtgactaagattaattcaacttaaacaggaaggataattatgaaattcacagacacaccaaccaccacgcttgatgagttgctaatcaaacatcgaggc

SEQ ID NO: 38375 - DNA, 260 bp, Unknown
  Description of Unknown: RightRegion for integrase A943 sequence
attaacaaaatggtttctgactcaggccaatcaagcatcggaatggccattgcgatgaattcaattccagacctaactctcgctctattcaattttcaagaagctgtaaatccagcgatggagtcacaaggtgtgaaaatcctcaccctttctgagttgttcggtcaagaaattacactgacagttaagtaaggaatattatgaaattcaccgacacaccaacaaccacgcttgatgaggtacttatctcaaagcgtggc

SEQ ID NO: 38376 - DNA, 260 bp, Unknown
  Description of Unknown: RightRegion for integrase A944 sequence
attaacaaaatggtttctgactcaggccaatcaagcatcggaatggccattgcgatgaattcaattccagacctaactctcgctctatttaattttcaagaagctgtaaatccagcgatggagtcccaaggagtgaaaatcctcaccctttctgagttgttcggtcaagaaattacactgacagttaagtaaggataattatgaaattcacagacacgccaaccacaacgcttgatgaactgcttgagtttacgcacggc

SEQ ID NO: 38377 - DNA, 260 bp, Unknown
  Description of Unknown: RightRegion for integrase A945 sequence
attaacaaaatggtttctgacgcaggtcaatcaagcataggaatggctattgcaatgaatgcaattccagacttaactcacgctctattccattttcaagaagctgtaaatccagcgatggagtcccaaggagtgaaaactctcaccctttctgagttgttcggtcaagaaatcacactgacagttaagtaaggaatattatgaaattcacagacacaccaacaaccacgcttgatgaggtacttatctcaacgcgtggc

SEQ ID NO: 38378 - DNA, 260 bp, Unknown
  Description of Unknown: RightRegion for integrase A946 sequence
tggattctgttatcggctaaccggaagggagttaaaaaacgggattaccgcgctaactagaagcatgagggaaggttgtggcatccggtgaacctgtaggaatcccataactgattaaggacggaaaccaccagatgccacgaagatgttatggcgcatgttgttgtgggaagtcaataaaggagatggttttgtttaaaaaatagtctatcatggtgagaaaatgattttgataagtaggctaactttctgaaaatact

SEQ ID NO: 38379 - DNA, 260 bp, Unknown
  Description of Unknown: RightRegion for integrase A947 sequence
gtgcgagtgcatcgcgatggctggaataatatcacgcacttggagtggttaaacaaatgagaaagaacggtaacagcaagcatgtgctgcgcgtcattaccgatcaccagccagtgactaccaagaagattgctttcttgctcgggctgacaagtaagcaggttagtgacgcaactcaatacctgcgtgataagtcattggtaaagcttgtgcgtaacggctatgtggtcataggcggcgagtttgacaatgtaccggcc

SEQ ID NO: 38380 - DNA, 260 bp, Unknown
  Description of Unknown: RightRegion for integrase A948 sequence
agcctctgcggcttctagtgggatttgcactgtcataaatatagtcctgaatttaatgctccccaccacaacggctaaaggcacaggacagagccgaggagcaagttaagtataaccacttcaaaataattaaacaaatgacttgattttgttcaatatgctgattaagattaattcaacttaacaaacaggatgattaaatgaaattcacagacacaccaaccaccaccattgatgaagtgttaattagcactcgtggc

SEQ ID NO: 38381 - DNA, 260 bp, Unknown
  Description of Unknown: RightRegion for integrase A949 sequence
gggaagctagtggttttcgttgctgaccgtagacaggggcatcataagaaggctaactaacaatgcaaacaccaaactacgcacgtaacgcacacaaggctgcacaagccgaaagagacaaagactatccaatggcagcggtgtattggaataaagccgctaaaagcgagtgtagcgacaaacagcgccattgggctgagtgtcgctgtcataactgcaaaagatttgtggaggaatgggatgtttagattaatatgcgc

SEQ ID NO: 38382 - DNA, 260 bp, Unknown
  Description of Unknown: RightRegion for integrase A950 sequence
cctctgcggcctcttgtgggatagagatttttttagtcatgggaatcagtcctgttaaggctccccaccacaatggctaaaggtacaggacagaccggggagcacgttaagtataaccacttcaaaataattaaacaaatgacttgattttacccgactcagtgactaagattaattcaacttaaacaggaaggaatattatgaaattcacagacacacccaccaccacgcttgatgagttgctaatcaaacatcgtggc

SEQ ID NO: 38383 - DNA, 260 bp, Unknown
  Description of Unknown: RightRegion for integrase A951 sequence
cctctgcggcatcttgcgggatagagatttttttagtcatgggagttagtcctgttaaggctccccaccacaatggctaaaggtacaggacagaccggggagcaagttaagtataaccacttcaaaataattaaacaaatgacttgattttacccgatccagtgactaagattaattcaacttaaacaggaaggataattatgaaattcacagatacaccaaccacgacacttgacgaagtacttatctcgactcgtggc

SEQ ID NO: 38384 - DNA, 260 bp, Unknown
  Description of Unknown: RightRegion for integrase A952 sequence
tctcttggtgcgtcatggcgtcgcattttttattacacataataatcagtcctgttaaggctccccaccacaatggctaaaggtacaggacagaccggggagcacgttaagtataaccacttcaaaataattaaacaaatgacttgattttatccgattcggtgactaagattaacttaacttaaacaggaaggaatattatgaaattcaccgacacaccaaccacgaccattgaagaattgctaatcaaacatcgtggc

SEQ ID NO: 38385 - DNA, 260 bp, Unknown
  Description of Unknown: RightRegion for integrase A953 sequence
gagcgtcagacgctgtttttccacattctttattacacataataatcagtcctgttaaggctccccaccacaatggctaaaggtacaggacagaccggggagcacgttaagtataaccacttcaaaaaaattaaacaaatgacttgattttacccgattcagtggctaagattaattcaacttaaacaggaaggaatattatgaaattcaccgacacgccaacaacgactattgatgaggtgcttatctcgactcgtggc

SEQ ID NO: 38386 - DNA, 260 bp, Unknown
  Description of Unknown: RightRegion for integrase A954 sequence
ctctgcggcctcttgtgggatagagatttttttagtcatgggagttagtcctgttaaggctccccaccacaatggctaaaaggtacaggacagaccggggagcacgttaagtataaccacttcaaaataattaaacaaatgacttgattttacccgattgagtggctaagattaattcaacttaaacaggaaggaatattatgaaattcaccgacacaccaaccacgaccattgatgaggtacttatctcgactcgtggc

SEQ ID NO: 38387 - DNA, 260 bp, Unknown
  Description of Unknown: RightRegion for integrase A955 sequence
tttcttggtgcgtcatggcaccgcattctttattacacataataatcagtcctgttaaggctccccaccacaatggctaaaggtacaggacagaccggggagcacgttaagtataaccacttcaaaataattaaacaaatgacttgattttacccgattcagtggctaagattaactcaacttaaacaggaaggaatattatgaaattcaccgacacacccaccactacgcttgatgagttgcttgagtttacgcgtggc

SEQ ID NO: 38388 - DNA, 260 bp, Unknown
  Description of Unknown: RightRegion for integrase A956 sequence
cactggcaaccaccgtgcatggcgcaacgtgatcaagcagcgctggcacaaggcagcggacgccgagattcgggaactggccgggatgctcctccaggagctccggaagatcgcaccgaacacctaccaggacatccccgaggagccgtatggctgacgtgcgggaggtggcagatctgcttaataggttgaacaccattgtgcgggaactggtttcagagaactctcagctgaaagcggaggctgagggcaaggctagt

SEQ ID NO: 38389 - DNA, 260 bp, Unknown
  Description of Unknown: RightRegion for integrase A957 sequence
ctgccatttctttggagatttttacttgtgatttagtcatgggaattagtcctgttaaggctccccaccacaatggttaaaggtacaggacagaccggggagcacgttaagtataaccacttcaaaataattaaacaaatggcttgattttaatcattactgtgattaagattaattcaacttaaacaggaaggaatattatgaaattcaccgacacaccaacaaccacgcttgatgagttacttaactcaacgcgtggc

SEQ ID NO: 38390 - DNA, 260 bp, Unknown
  Description of Unknown: RightRegion for integrase A958 sequence
ctgccatttttttggagatttttacttttgatttagtcatgggatttagtcctgttaaggctccccaccacaatggctaaaggtacaggacagaccggggagcacgttaagtataaccacttcaaaaaaattaaacaaatggcttgattttacccgatttggtggctaagattaattcaacttaaacatggaggataattatgaaattcaccgacacaccaaccacaacgcttgatgaggtacttatctcaacgcgtggc

SEQ ID NO: 38391 - DNA, 260 bp, Unknown
  Description of Unknown: RightRegion for integrase A959 sequence
ctagtgcgcgtcgagattcatggcgactttgaagaaaagttaactgtgattaatcattagtgtgaagttggtcacagcattaggcttgttttgtggttattatctaaacatcaaattaagagggcgtaacaatgggtttagtattaacaacgctaaccgaagcaaaagcgaacgggaatcttagagaagaatcattgcgcatggctggattgcttgggatggaattcaatcagtttattgaagaattagatatcggctgg

SEQ ID NO: 38392 - DNA, 260 bp, Unknown
  Description of Unknown: RightRegion for integrase A960 sequence
aaattttgcgttgataagtctctaacaattggcaaaacaaccattcaagtaaagagtactaagaagcttgataagggcgaaatgaccttttacatgaatcaaattcaccagtgggcggttaatgcaggatttaggctatcaatgccagaagattccgaatactaccaggcaatgcaacaacaaaaccaataggaaaaaccatgctaaaaacaaaaccaacccaagtgtgcactgtggccgatgttttagtgaagactcgc

SEQ ID NO: 38393 - DNA, 260 bp, Unknown
  Description of Unknown: RightRegion for integrase A961 sequence
tacgggtggacataccgagacgccggcacattcacggcgtcgatgcggtgggcccgatgaccaaccccgacaccaccaccaccgacccctacgacggcctcggatacgccgacgtcgccgacatctactacaccgccggctggcacggcgtcctcccactccgacccggcgtcaaagggccaccaccccaagggttcaccggcatcgacgcccccatgccctcataccccgacgtactcgaatggatcgaccgccacccc

SEQ ID NO: 38394 - DNA, 260 bp, Unknown
  Description of Unknown: RightRegion for integrase A962 sequence
aacggcgttttaatgattcatcagggcgggagaggtatctatgaccgtaaccagcattaaccaggcgaaacagcagtgtgaacgtgacgaagctgaattgcgcagcgtcagagagatgacggagcaacaccagaaggcgatggattatctgcatgagcgagagcgtgaactggtgaaccggcttggattgaacaagacatcgggaggcgatgctgcatgaatttggaaaacactgtgaaattccactctccgaagtctcc

SEQ ID NO: 38395 - DNA, 260 bp, Unknown
  Description of Unknown: RightRegion for integrase A963 sequence
aacggcgttttaatgattcatcagggcgggagaggtgtctatgaccgtaaccagcattaaccaggcgaaacagcagcgtgaacgtgacgaagctgaattgcgcagcgtcagagagatgacggagcaacaccagaaggcaatgaattatctgcatgatcgagagcgcgaactggtgaaccggcttggattgaacaagccagcgggaggcgatgctgcatgagtatacgagaattgaacctcactaaagagcagcatgactg

SEQ ID NO: 38396 - DNA, 260 bp, Unknown
  Description of Unknown: RightRegion for integrase A964 sequence
aacggcgttttaatgattcatcagggcgggagaggtatttatgaccgtaaccagcattaaccaggcaaaacatcagcgtgaacgtgacgaggctgaattacgcagcgtcagagagatgacggagcaacaccagaaggcgatggattatctgcatgagcgagagcgtgaactggtgaaccggattggattgaacaagccagcgggagacgatgctgcatgagactcgaaagcgtagctaaattccattcgccaaaaagccc

SEQ ID NO: 38397 - DNA, 260 bp, Unknown
  Description of Unknown: RightRegion for integrase A965 sequence
aacggcgttttaatgattcatcagggcgggagaggtatttatgaccgtaaccagcattaaccaggcgaaacagcagagtgaacgtgacgaggctgaattgcgcagcgtcagagagatgacggagcaacaccagaaggcgatggattatctgcatgagcgagagcgagaactggtgaaccggcttggattgaacaagccagcgggaggcgatgctgcatgagtatacgagaattgaacctcactaaagagcagcatgactg

SEQ ID NO: 38398 - DNA, 260 bp, Unknown
  Description of Unknown: RightRegion for integrase A966 sequence
aatggtaaattattcgttaaaccaggattaaaaggacgacatacccgtgacaaaagataaacagttattacgcgacctggaagaaaattatgaacgtgcgctggctgctgtagcatatctggaagaacagatccgcgaagttaaaaaccgtttacagggtaacgagaaacgtaatctaccccattgttaaacctgtgatataatcagccttagtaactctactgaggcttttttatggctgttaaagacccatatccgga

SEQ ID NO: 38399 - DNA, 260 bp, Unknown
  Description of Unknown: RightRegion for integrase A967 sequence
gaggggattgcgttggcgaaggcgcgtggtgtgtgtactgacctgatctgtcccgtttgacccacgaacatcgtgaacgcgggcagaattgcactctgtgacagagccgaaaacgattcgtcggtatacgactcgtgcattgcttgacgtcggacctcaaccaggaatggtcatccgcgcctccgacgacgatgctgctccgtggaagctagtcgacactctccacgacgaatggttttgggacacaactcccggccagg

SEQ ID NO: 38400 - DNA, 260 bp, Unknown
  Description of Unknown: RightRegion for integrase A968 sequence
aacggcgttttaatgattcatcagggcgggagaggtgtctatgaccgtaaccagcattaaccaggcgaaacagcagcgtgaacgtgacgaggctgaattacgcagcgtcagagagatgacggagaaacaccagaaggcgatggattatctgcatgagcgagagcgtgaactggtgaaccggcttggattgaacaagacatcgggaggcgatgctgcatgaatctggaaaatgtagtgaagtttcacttcgcaaaatctac

SEQ ID NO: 38401 - DNA, 260 bp, Unknown
  Description of Unknown: RightRegion for integrase A969 sequence
aacggcgttttaatgattcatcagggcgggagaggtatctatgaccgtaaccagcattaaccaggcgaaacagcagcgtgaacgtgacgaagctgaattgcgcagcgtcagagagatgacggagcaacaccagaaggcgatggattatctgcatgagcgagagcgtgaactggtgaaccggcttggattgaacaagccgtcgggaggcaatgctgcatgagtatacgagaattgaacctcactaaagagcagcatgactg

SEQ ID NO: 38402 - DNA, 260 bp, Unknown
  Description of Unknown: RightRegion for integrase A970 sequence
aagatgcttgggattagtcgctcggggttgggtggtatcttgaagagggtgagtagatgattgtctttttatgcgtcttgctatttgctgttatagcagggtggaagtcggatagttggcatggctcactattgatggggtttataattttagctttgttgttgtcgatattaagagttggaggttgggtgtgaaaattgatggtaaatacgattcttatattgtttatagtgagaaggggtataaaaatagaatccgat

SEQ ID NO: 38403 - DNA, 260 bp, Unknown
  Description of Unknown: RightRegion for integrase A971 sequence
caatattgtgaccactagactttatttagaaggaagtgtttcagaagatctatttgaagaaattatggattctgccgatttgtctaagtgggatccgattgcaccacatggttttttcttaatagatattggctttactgaagatggtgctgaagctttgtttgcaaaagaagttaaagcggaaagtaaggaggggtgaaatgacaaaaacaccaatagatcaagaaattgacgaggccatagctaatggtgaaagcttt

SEQ ID NO: 38404 - DNA, 260 bp, Unknown
  Description of Unknown: RightRegion for integrase A972 sequence
gggtggcaagaaaaagccaaagctcaggcggtgccagagggttatgttgtagtgccgaaagatgttgcagaacgaacaattggtcatattggcatagcaatctatcatccaaacaatactcgtgatgaagaaaatattatgagtgaagaccaagtggttattgagcgcgctattgaagcaagcgaatcgggagctgagggatgaatagatcaatagagcaagaaattgacgaagctatagctaacggtgaaagcttttat

SEQ ID NO: 38405 - DNA, 260 bp, Unknown
  Description of Unknown: RightRegion for integrase A973 sequence
aaagaagtggttgaggagatgcggggtgtagacaatatgctggctagtttaatggatgccaatgttgattgggcttactcattccctgtttacaaaggtgaggataaagcggttattgcatcaaactttgctaatgagtcataccagatttgtaaggatgaagaaaatcgtgcggctaatgttaaggagttttactagcaatgaaaacaaccgtagatcaagaaattgacgaagccatagctaatggtgaaagcttttat

SEQ ID NO: 38406 - DNA, 260 bp, Unknown
  Description of Unknown: RightRegion for integrase A974 sequence
attgtaaatggtaagttatttgttaaacctggctttaaaggacgcattaagcatgactaaagacgaacagttattacgtgatttagaacaggattatgaacgtgcacagactgctatagcttatctggaagaacagatccgtgaagttaaaaaccgtttacagggtactgaaaaacgtgtcgtacagcgataacttaaacctgtgatataatctgcctcagttaccacgactgaggcttttctatggcagttcgcgaccc

SEQ ID NO: 38407 - DNA, 260 bp, Unknown
  Description of Unknown: RightRegion for integrase A975 sequence
aataacccaagcgatgcatggccgattattgttgagagcaagatttcattaattgaagagggtgacgagtgggcggcttactttgtttttgagttacctgaaaacatggagggcggtgggtgtgattttattcatggatggactgataaaaacccactacgcgccgcaatgattgtttatcttatgatgcaggaggcgaaatgctaacaatctcagaccttttagtcatgacgcgcggcaaccaatcagaagtcgcacgt

SEQ ID NO: 38408 - DNA, 260 bp, Unknown
  Description of Unknown: RightRegion for integrase A976 sequence
agcctttaccgcaaaatgaaagaattgaaagtttttactgaagagaaggaaaacaactaatgcgcgatttccgtaaagctttaaacaacaatgttatgatgaagtatgaatctttctttggtcatggagatatcaaaacgttttggattgaacttaaatcgggtttgacactttcaattcaagctggggaaggtaattatagttctccacgcacaaactttaaacatcctcagtttcagcgttataaagaatttgagatt

SEQ ID NO: 38409 - DNA, 260 bp, Unknown
  Description of Unknown: RightRegion for integrase A977 sequence
accaaaactttataaaaatgaaggaaaaaataatacgaattttagaaaatagagcaacaaagtttgaatctataaaccactcttatgaagcacgggaagtaaaaagcgcaatagacacaattaaaaggctcgtacctcctgaattatttgatatacacattgttacctgacgaagtgaacagtttaaaatactatttattatgaaaaaatggactaaagaagaagaacaagaattagtgaggcttactgaaaatgcgtgg

SEQ ID NO: 38410 - DNA, 260 bp, Unknown
  Description of Unknown: RightRegion for integrase A978 sequence
acgacggtgctcacaccgtcttcaacttcgaccacatcacccactacgtcgtggttccgatcgatgacgagaaggaagaggagggattccgaattggctgagactcgccaacgcttctgagggttctcgatgagatcgaggacatcctcgcggagaacgaagacctgcggcatgaggtcgagaagctgagggcagagtcgttgcacgccaagggcgctggccgaccgaaccgcaagaagctctctgccgaagaggccaag

SEQ ID NO: 38411 - DNA, 260 bp, Unknown
  Description of Unknown: RightRegion for integrase A979 sequence
atagatcgcgatacggtcaagcgatgggtggcagagcataaaaactcaaaaggttcgtagcgttacaaacagcaataaggcttcgaagccagggagcaaaacacagccaccctatatttgaggtgtcaacctgtaagacatcccatggcaatcacccgcgtaactcgcgacgtcacgatctcgtttcgagtcagtgagaaggaagccgagctcctgaacagagccgctgacagtcgctctctgaataccagcgcctggat

SEQ ID NO: 38412 - DNA, 260 bp, Unknown
  Description of Unknown: RightRegion for integrase A980 sequence
gtagccgatgtgacaggcgtggacgtgaaaacaatctacaagtacctcccggcgacttgaagacaaagatttcactacttttcctgatatgttacgtttggcttaatcaattcattcagctttgaaaacagtttgggttgttcgtgaacggtaagaaaacaataagttttgagcaatttttaactattaacagcaatcttgtttccatctcagatacatgggctgacttgtgggcgttaatttttcacacgggtttaagc

SEQ ID NO: 38413 - DNA, 260 bp, Unknown
  Description of Unknown: RightRegion for integrase A981 sequence
gcacagagcttaaatgtaagtgtggctaccgtgtttaaacattgtaaggcaggtgattgatggctaaggcaagagaatcacaagcagaggctcttgccagatgggagatgctacaggaattacagcagacctttccttacacagcggaaggtttgcttctctttgcagatacagttattcataacttgattgcaggcaaacctcatctgattcgtatgcaggccgatattttaaagtttctattctatggacataaatat

SEQ ID NO: 38414 - DNA, 260 bp, Unknown
  Description of Unknown: RightRegion for integrase A982 sequence
ttgaactgcaggaagttcacaccccaatcccaaatgagtacagcaggaggagcagtatgaagccaccacgccggcgatcagggaccgtgtccaccaggcgcgggtgaagaacgcgttggagcccgagtgggaagccaggttcgacggcaggagctacggcttccgccccggacgtggatgtcaggacgcaatggagacgatccacaatgtcaccgctaagcgcaacgcgcgacggctgtgggttctcgacgcggatctgg

SEQ ID NO: 38415 - DNA, 260 bp, Unknown
  Description of Unknown: RightRegion for integrase A983 sequence
accctggatcgataccggcggggccgcgacgccgacgcggccccgcccgggacggcctgatcccgcctcgggggcctctccagctcgagcggccgcacggcgtcggggttccgcaaccctcgacgccgtgcggttttctttttagccgtcgtccagttcgaggatcgttcgttctcggagtagtcgtggacgcgaccacggcggatacgaacgatcgaatcgcgaaccgagccgcgtagttcgaattcgaagcggctccc

SEQ ID NO: 38416 - DNA, 260 bp, Unknown
  Description of Unknown: RightRegion for integrase A984 sequence
cccgcctcagacccttatcggacgggctctcagtcgcaccatacaatctatggaaagtagcaaatctcaattatatttcgaccaagtctcaatgatttttctttcttctttagtcattccggtaagattattgagtggcatgaagtgtgtcagtactgcagctgtttttatggcctgacggttgcttacgatctcatccggcgtatccagcaaaacaccgttcggcggcgcatgtacgtccttgtaagagggattttgcg

SEQ ID NO: 38417 - DNA, 260 bp, Unknown
  Description of Unknown: RightRegion for integrase A985 sequence
gctctgggcgccacgcccggttcccaatcatcctcagcagcaaggaccacagcacaatgaagacggctcggacggcggggccacgcactgggcggtcgtcgcctcgctggtcgagacgtgcaagctgaacggggtcgagcctcaggcctatctgaccgacgtgatcgcccgcatcgtcgccggccatccgcagagtggcctcgacgatctgttgccctgggcctacgccccgcaacccctcaaggctgtggcttgaggac

SEQ ID NO: 38418 - DNA, 260 bp, Unknown
  Description of Unknown: RightRegion for integrase A986 sequence
aaaggtctatggatcaagaccatagatcaaaacccaaccctcttcgaacacatgctatgagccagggggcattatgaaagtcgatccaacagccctttgatgtcgaattcgagaacccgatcatacttccagcaccgctggcgcgtcacgcccacggcatccagggccgattttcccggcctgtaaccgtaggagtcgggaagaaagagggagtccaaatccggctcgatcatctgcttgaccaccatctgcgcgatccg

SEQ ID NO: 38419 - DNA, 260 bp, Unknown
  Description of Unknown: RightRegion for integrase A987 sequence
gtcgccgtgctcggcctgctcacgaggcgatctctcgaagctcgccggtcgcccatttgaggggcaggcggccgaggctccgatcaatccgtcttcgaccttggcgcgaggcgagcgaccatcggcgcggcaagcgcgtggtagagcccttcgcggcacacgagcttcgaggtcgcgtcggcgatcacggccgagaccatcagcggaatgatcatggcatggttctccgtcatctccgacacgatgacgaaggaggtgat

SEQ ID NO: 38420 - DNA, 260 bp, Unknown
  Description of Unknown: RightRegion for integrase A988 sequence
aaaggcttgcgtatcaaggctgtcaacgatcaacctgacctcttcgaacactcctcatgaaccaaagggtattgcgatgcacgatccaagaacttctccagatcaacatccaccaccactttgcgccccgaggacacataccgctgagccgccaaaacggcgtcctgcgcgcaacgtcccgggcgaaagccgtagctgtgttcactgaaagttggatcgaggagtggctgcaagacttgcagcagcgcttgttggatcaa

SEQ ID NO: 38421 - DNA, 260 bp, Unknown
  Description of Unknown: RightRegion for integrase A989 sequence
ataaacgaagccgtcattgttcaactcgaaaacttcaacttcaacgtgtgcttaaactagcgcttactagctgtgcgccgaactgcgaagcggaacaggacggagaaaggatttacatccgcaccatcgcgaagatcaaaccaggcgacgaaatcctgatcgattaccggcttgacgtggggacccggccaatcaaagcactgaaggcgacatatggatgccggtgtggcgccaagcgatgtcgactaacgatgttgcat

SEQ ID NO: 38422 - DNA, 260 bp, Unknown
  Description of Unknown: RightRegion for integrase A990 sequence
tggcaaggagaaacatcagtgcttgcccaatccaacgagagtgacgatgaacgaacttagcaacaaaagttgcaatgcgataggtttagcttggagaagcaaataatgaaacaacaatctaaatcaacagactcgaaacattcggctgaaaaagttgaggtttacagcggcagtctggctgggtcatctccaccacccaccgctttttgagtagaacaaagcccttggtttgttccgggcgtaatacgacctggacaatc

SEQ ID NO: 38423 - DNA, 260 bp, Unknown
  Description of Unknown: RightRegion for integrase A991 sequence
tggtacagccgccgactctgggcagatagcaccgacgaactgacgcatccacattcataggtgcagtgtgcttgacccatctcgaccacccagcgccgcggggtcaccgagaagcctttgacctgggtgttcctggggacgacgtccacgtcgatgccgagggcggcgccgtattcggtggcctggttcttgtagccggtgtcgacccaggccttggtgacggtgggggtggtcgaccgcgaggtgggtcaggagctgct

SEQ ID NO: 38424 - DNA, 260 bp, Unknown
  Description of Unknown: RightRegion for integrase A992 sequence
tatcgacaaatgcaaaccgagccaagaacatcaactggcgaggaaagaggtgtagtatgaacgccgatcgttggcgaccaagcatacgccactgccatcccagaagatcagtttgatgcggtcggtgcgcttggccctgaacacgtagatcgtgccggagaatggatcagttcccatctcagccttcaccagcgcagccaatccctctgcacccttgcggaagtcgaccggcttggtggcgatcatgactttaaccgcgc

SEQ ID NO: 38425 - DNA, 260 bp, Unknown
  Description of Unknown: RightRegion for integrase A993 sequence
tgggcgaacaaggggcggcttgccgaactgaccagaccgaggccgcgcccgggacggtagagtgagggcggcccggctcagggcgagccgggccgccccatcgcgctcttggagggcattatggctggaacatcgagctcgggtaccagcagatgaaggaggaactggggctggaccaccacgagggccgctcgtggcggggcttccaccatcacgcctgcctggtgatgttggccttcgggttcctcaccctggagcga

SEQ ID NO: 38426 - DNA, 260 bp, Unknown
  Description of Unknown: RightRegion for integrase A994 sequence
cgccaacaaacgcaaactgagccaagaacatcaactggcgaggaaagaggtgtagtatgaacgctgatcgttgtagaacaggcagaacccttgaccgtcccaccaaagaagcttgatccgatcaggccaatgaccgacattcagcgttggtgcatggatcctttgtcaacggtttggcgataggcaggcaggatcgaaatcagtttgatccgagtgccatgccgtacaaacacaacgccgatcgtcgtcatcacgtcgga

SEQ ID NO: 38427 - DNA, 260 bp, Unknown
  Description of Unknown: RightRegion for integrase A995 sequence
tatcgacaaatgcaaaccgagccaagaacatcaactggcgaggaaagaggtgtagtataaacgccgatcgttcgtgaacaggcaggcgccttggccgtcatgccaaattagttttaccagatcacctcgtcgacccctgaagcagaacagatgaccgcccagagggtcatgcttcaacacctcctgcacccgaagggccagcgaaggaaagccgcaccgcatgtctgtatgtcccgtcgccagccacaccttgacccccg

SEQ ID NO: 38428 - DNA, 260 bp, Unknown
  Description of Unknown: RightRegion for integrase A996 sequence
tatcgacaaatgcaaaccgagccaagaacatcaactggcgaggaaagaggtgtagtatgaacgccgatcgttggcgactaggcagacgccgctgccgtcccagaagatcagcttgatccggtcggttcgtttggcccggaatacgtagatcgtgcccgagaacgggtctgcacccatctccgccttcaccagtgccgccaatccttcagcacctttgcggaagtcgacaggcctggtggcgatcatcacctttaccacac

SEQ ID NO: 38429 - DNA, 260 bp, Unknown
  Description of Unknown: RightRegion for integrase A997 sequence
cgccaacaaacgcaaactgagccaagaacatcaactggcgaggaaagaggtgtagtatgaacgctgatcgttgtaggccatcaccagaccgctgccatcccagtagatcagcttcaaccggtcggccttgcgtgactggaatacgaagaccgtcccggtaaacgggtccttgtgcagctcgttcttgaccaatgccgccaacccatcatggcctttgcggaagtcgaccagcttggtcgccaccatgatccggacgcggt

SEQ ID NO: 38430 - DNA, 260 bp, Unknown
  Description of Unknown: RightRegion for integrase A998 sequence
atcgacattctgcgcgctcgcgctcaacgcaatagacgatcgaggaaacaggcatcatgaaatcattggtgaccctgtcgtcgccaccgcgatattggaccgcctgctgcaccattcgacagtgatcacaggcttcgcgaaaagcgccgttccggccttctgcagaaggccggaacggcgctcgagacaaacgaaacagcaagtcaatgaagggggtcagttcatcgtttcgcctacggggtcaaatcttcacttcgctt

SEQ ID NO: 38431 - DNA, 260 bp, Unknown
  Description of Unknown: RightRegion for integrase A999 sequence
atccggtatctgcagaatcgtttacaacgcatcagacgatcaaaaaaggtggcatcatgagatcttcgcgtccccaatcaggtcatgccatgcgtccacgggaacctggctcgtgacgatggtcgatgagcggccgtgacgatcgtcgaggatttccaggagatcgcgccgctcggacccggtgagcactgacaagccccaatcatcgaggatcagcacctgtacgcgaccgagggccttgagcaggcggccatagcgcc

SEQ ID NO: 38432 - DNA, 260 bp, Unknown
  Description of Unknown: RightRegion for integrase A1000 sequence
atgagtcagcttcgcaaccgggtacgacgcaccaagcgttcgaagaaggaggcatcatgaagtcatcggctccccaatggctccatgccaggtgtccacggggagctgacttgtgacgatggtggatgcgcggccatggcggtcctcgaggatttcgagcagatcgcggcgttccgcggcggtgagcaccgatagtccccaatcatccaaaatcagaagctgagcgcggccgaggcttttgaggagccgggcgtaacgtc

SEQ ID NO: 38433 - DNA, 260 bp, Unknown
  Description of Unknown: RightRegion for integrase A1001 sequence
ctcgtcgatcgcctcgccgcccataaggaaaatgccagacacgccaaaaccttcaactgaatccgaaagagagatgcagtatgaatgcagatcgttgtaggttagcaccattccggtgccatcccacaccaggatcttcaggcgatcgccgcgcttcgaccggaagatcaccgtcaccccggaatgcggatcgagcttcaattcggtctgcaccatcagagccagcgcctgatgcccacagcggaagtcaaccggccgcg

SEQ ID NO: 38434 - DNA, 260 bp, Unknown
  Description of Unknown: RightRegion for integrase A1002 sequence
ctcgtcgatcgcctcgccgcccataaggaaaatgccagacacgccaaaaccttcaactgaatccgaaagagagatgcagtatgaatgcagatcgttgtaggttagcaccattccggtgccatcccacaccaggatcttcaggcgatcgccgcgcttcgaccggaagatcaccgtcaccccggaatgcggatcgagcttcaactcggtctgcaccatcagagccagcgcctgatgcccacagcggaagtcaaccggccgcg

SEQ ID NO: 38435 - DNA, 260 bp, Unknown
  Description of Unknown: RightRegion for integrase A1003 sequence
ataaaggcgctcacagcgccaaattacagtatgaccccttccaggaaagcagcatcatgaaacgttcggcgagccgaccatcgccgacgccatcctcgatcgcatcatccataacgctcatcgcatcgccctcgaaggcgacagcatgcgacgacaaaaagcgccttcaggcttgacccaggatccaaatccggaaatcactcaaccctaacagcaaccaggcatccaatgcctaaaccagctgtcccggatttactgaa

SEQ ID NO: 38436 - DNA, 260 bp, Unknown
  Description of Unknown: RightRegion for integrase A1004 sequence
ctcgatcagctcgatctcagaatcactgagcctcacgaggaggggcatcaacatgcgtaatcgagcagcaccgagagttgagcatgagatagcggcatgacgccttccttgatcggcggccaggtgaactgcccctcgattcttttgtagtaaaggacaaggccgcttccgtcccaggtcaggatcttcacgcgatctcggcgcttggaccggaagacataaagtccgccgtcgtacggattggccccaaacccctcgct

SEQ ID NO: 38437 - DNA, 260 bp, Unknown
  Description of Unknown: RightRegion for integrase A1005 sequence
cgccccaagaacctcattgattatcaaagagatgagacgatgccgctgccaggattgtgaaaggagggatgcactatgtcacgcgatttggtgacatggtgaagtgcctgtggcatgacgggctcggcatgtcgctttacgccaagaggcttgaacggggccgtttcatctggcccagcccggccagcggagccgtggccatttccgcgtcccagttcgcgtatctgctcgacgccatcgactggcgcaatccgcagcag

SEQ ID NO: 38438 - DNA, 260 bp, Unknown
  Description of Unknown: RightRegion for integrase A1006 sequence
cgccccaagaacctcattgattatcaaagagatgagacgatgctgttgccaggattgtgaaaggagagatgcactatgtcacgcgatttgcgcgccgcccccggaacagaaagcgcccagtcatccacgccgatgacgcgcggcggtttaacggtcggcaagggcaatgcccggatgacacgtagcagggtgtccctgctgactggcatcccaagcccgcgggcgagccgcgcccccgcagcgcccccgagagcaatccc

SEQ ID NO: 38439 - DNA, 260 bp, Unknown
  Description of Unknown: RightRegion for integrase A1007 sequence
cgccccaagaacctcattgattatcaaagagatgagacgatgccgctgccaggattgtgaaaggagggatgcactatgtcacgcgatttggtcggcggccccggaacaggaagagatggccggagtagggatccttcttgagaacctcctggaccaacagggcgaggccgtcgaagcccttgcgcatgtcggtggcgcccatcgccagatagacccgcaccccggcggggaccgggatcatcggcgctccagaacggcga

SEQ ID NO: 38440 - DNA, 260 bp, Unknown
  Description of Unknown: RightRegion for integrase A1008 sequence
cgccccaagaacctcattgattatcaaagagatgagacgatgccgctgccaggattgtgaaaggagggatgcactatgtcacgcgatttggtgacatggtgaagtgcctgtggcatgacgggctcggcatgtcgctgtacgccaagaggcttgaacggggccgtttcatctggcccagcccggccagcggagccgtggccatttccgcgtcccagttcgcgtatctgctcgacgccatcgactggcgcaatccgcagcag

SEQ ID NO: 38441 - DNA, 260 bp, Unknown
  Description of Unknown: RightRegion for integrase A1009 sequence
cgccccaagttttatgaagattatcaatacgataaagtcgtccggttgcccggaatttgatggagggatgcattatgaagcgcactgtgacggtctgatcaaggtgatctggcatgacggccagggcgcttgcctgttcacgaagaagctggagcgcggccgcttcatctggccatcagcggccgatggcacggtggtgatcacgcctgcgcagctcggttatctgctggaaggtatcgactggcggatgccgcaaaaga

SEQ ID NO: 38442 - DNA, 260 bp, Unknown
  Description of Unknown: RightRegion for integrase A1010 sequence
cgcccgaagttttatgaagattatcaatacgataaagtcgtccggttgcccggaatctgatggagggatgcattatgaagcgcactgtgcccgttttccgcggaagccgaagatcgcgccggagcccggtgcctccttgatcgccgtctcgaccagcgccgatagaccatcaatgccacgccgcatatccgtcaccccgcaggccagatagacacgcacattccccgaaggcccgatcatgccgcctccagacaggccgc

SEQ ID NO: 38443 - DNA, 260 bp, Unknown
  Description of Unknown: RightRegion for integrase A1011 sequence
gtcaatgaactggatttgagaatctgtcagcatgacgacagggggtatcaacatggatgatcgctggagggcattgactggcgcaatccgcgctggacacaacgccctgcaaaggctggataaatcgcgctggtcggcctgtttttattggtgtcttacgtgcctgagtggtagacatccgccatgtcgaacgccgcttctgaactggttagattacgcgctgccctggctgccgccgaggcccgtgcggaggttgcaga

SEQ ID NO: 38444 - DNA, 260 bp, Unknown
  Description of Unknown: RightRegion for integrase A1012 sequence
cggcccaagatttatgaagattatcaatatgataaggttgtccgattgcccggactttaacagagggatgcattatgaaacgcgttggcgtgaccggatgaagctcctgttcttcgatcggtccggttttgtgatggtgctgaagcgattgtcggaagaccggttccggtggccacgtcgggagatgatggtggtaacgctgacgaccgagcaattacactggattctcgacggcattgatatcgacgcgatggtccgcc

SEQ ID NO: 38445 - DNA, 260 bp, Unknown
  Description of Unknown: RightRegion for integrase A1013 sequence
cgtccacggcaagcccttgagaaggtggcagacaggtccatgcctctgcccggattttgacacaagaggtgcattatgaaacgtgatcggccttcctcgcccggaagacaaaaatcgtcccggtgaacggatccttgcgcagttcgttcttcaccatcgcggccaggctgtcgtggcccttcctgaagtcgataggcttcgtggccaccatgacccgcacccggttcgatgggaagatcatgagccagcacgcagcgcca

SEQ ID NO: 38446 - DNA, 260 bp, Unknown
  Description of Unknown: RightRegion for integrase A1014 sequence
cggcccaagttttacgaggattatcaatacgataaggtcgttcgactgcccggactctaacagagggatgcattatgaaacgcactgtggcggcttgatcaaggtgatctggcacgacggccagagtgcctgcctgttaacaaacgatcggcattcatactacacctctttcctcgccagttgatgttcttggctcggtttgcatttgccggtgcgcggcagcgcgatctttgaattggttccatcggctgcattgcttt

SEQ ID NO: 38447 - DNA, 260 bp, Unknown
  Description of Unknown: RightRegion for integrase A1015 sequence
atcgcgcaacttgatctaagaatctgtcagcctaacaaggaggggcatcaacatgggtgatcgaacagcgcttcgaactgcacgcgcgtcagatgcatgacgccgtcgctgatctgcggccactcgaaacgaccatcgcggccaaggcgcttgtagaccaaaacgaggcccgtgccgtcccatagcaaaatcttcagccggtcggcgcgcttcgaacgaaaaaccacgatcaggcccgaatgcggatcgagcccaagcgt

SEQ ID NO: 38448 - DNA, 260 bp, Unknown
  Description of Unknown: RightRegion for integrase A1016 sequence
cgcgaatatcgcgtcgagccgtcaacaacgcattcacgtaacgcaggaggtgcagtatgagttcaagcccttctcgttggcttttctgacgttgcaggcgacgatgtcgaccccccagtggcgcgcggcatcgaggtaacgcggattgaacaccggcgcctgaccaatcagccgctgcagcaccgcggacttcagattgtctaccatgaccttgcgcgggcagccatggaaggccgcgaacgcatgctcatgacaggcga

SEQ ID NO: 38449 - DNA, 260 bp, Unknown
  Description of Unknown: RightRegion for integrase A1017 sequence
attaatcacctcgatctgagaatcattcagcctcaccaggaggggcatcaacatgcgtagtcgtgggaagggatcgattggcgtcgtcctgattggggtgcgccaccggcccgtgtcgggtgattttatcccactgaaaccactggtttttatggaaatttatcctgactcgtggtagtcaggatcatgtctagcgcgacgacaaatcttccggacgatccagcctttctcaaggcaatgattgccgctttacaggcgga

SEQ ID NO: 38450 - DNA, 260 bp, Unknown
  Description of Unknown: RightRegion for integrase A1018 sequence
attaatcacctcgatctgagaatcattcagcctcaccaggaggggcatcaaaatgcgtagtcgagtgaggggatcgattggcgacacccgtcgtggacttccgctcccggtcgaacgggataaaagctatattttgcaggggcatcgggggtatattgctggtgtgctaggggcaaatcggctagatttgcgggtatggaaacagcgccgctagacagtcaggatgagctaactgctttgcgcgcactcgtcgcagaaca

SEQ ID NO: 38451 - DNA, 260 bp, Unknown
  Description of Unknown: RightRegion for integrase A1019 sequence
attaatcacctcgatctgagaatcattcagcctcaccaggaggggcatcaacatgcgtagtcgccagatggacgttcaagaaaccacggcaagcatacccggacgccttcgccgaactggcgtcgccagcctgcacccacgacccgtacccgttcaagcggtggttgcgcgagcatgatccggtgcatcgcgcggcgtcaggcctctttctgttgagccgccacgccgacatctatcgcaagacacttcctgtcggcttt

SEQ ID NO: 38452 - DNA, 260 bp, Unknown
  Description of Unknown: RightRegion for integrase A1020 sequence
gtcaaccagctcgatctgagaatctgtcagcctcaccaggaggggcatcaacatgcgtgatcgctggagggaatcgactggcggctgccgcagcacacggcccggcccgaacgggcgggctgaaaagctgcagacaagagggcgtgggcatgattcaatacccccatgtccagccccaatccgtccgcccccactgccgacaatctgcccgccgatctggcggcggcccatgcgctgatcctggcattgcagggggagtt

SEQ ID NO: 38453 - DNA, 260 bp, Unknown
  Description of Unknown: RightRegion for integrase A1021 sequence
tacagttcgacagaaccgacttttatccctgttccatcaaccacacaaggtgcagtatgaagcgtacgccttatcacggggctttcttggccgtgctgggagcatcgctgtcgcgtagtggttcacgaattcctgcgccgtgcggccaagacccggttcgtatcggtcaggtcgtgcaatcaatgcgcgcggattatctgggaccagcaggctcggggcgcctccgtagaattccatggcgccgataagcccgccgatcc

SEQ ID NO: 38454 - DNA, 260 bp, Unknown
  Description of Unknown: RightRegion for integrase A1022 sequence
tatggaagcaggtcgccgacgctcatcgccgtttcatcaaccacacaaggtgcaatatgaagccttcgccttgtcctgcggcttgtaagggcgcgcgggcaggatcgccacgccgtagtgcgcggcgaactcggcggtggtgcgctgcagttgcggctcataccggtcggcttgaccgatgagcgagcgcgtattgtcgggcacgacgagctcgggcacgccgccgatgaaggccagcgcccgggcgagcgagcccagcc

SEQ ID NO: 38455 - DNA, 260 bp, Unknown
  Description of Unknown: RightRegion for integrase A1023 sequence
tatggtagccgccaaccccggttaattgacgctcaaccaacccaacaaggtgcatcgtgatgtctgctccttggcctgcggggtgttggcacagatgatgtcgatgttcagctcataaagcgcccggccgaactgcgtcaggccgctggtccggtccttctcggacgcatgggtggagcggaaaacgccgtgcttgtcgctgtagaaggccagcggcttgccccattgctgcagataggccttcgtcgcatgcagatagt

SEQ ID NO: 38456 - DNA, 260 bp, Unknown
  Description of Unknown: RightRegion for integrase A1024 sequence
tacagttcgactcaaccgacgtttatcgctgttccaccaaccgcacaaggtgcagtatgaagcgtatgccttgtcctgcggacgatatacgcgcgcaggaaggaatgatgtgccgtagtgacgcgcgaagtccagcacagtgtcgccggcgcgaggttcatagcgatcgggatcggcaatcatcgcacgcgggttatccgggacgatcaactgcggcacaccaccatagaaggtcagcgcgcgagcgatcccgcccagcc

SEQ ID NO: 38457 - DNA, 260 bp, Unknown
  Description of Unknown: RightRegion for integrase A1025 sequence
tatggtagccgccaaccccggttaatggacgctcaacaaatccaacaaggtgcatcgtgatgtctgctccttgtccttcgggcggcgcggccgggccggtaggacgccgacgccgtagtgggacgccatcatgccgtagctgcggttgatctcgggatcatggaagctggcgcggttgacgccggacttcaggttgtccggcacgatcagccggggcacgccaccgaagaaggcgaacatgcgcacgtgcgagccgatcc

SEQ ID NO: 38458 - DNA, 260 bp, Unknown
  Description of Unknown: RightRegion for integrase A1026 sequence
tatggtggccgtcaacccagattaattgtcgctcaaccactccaacaaggtgcatcgtgatgtccgctccttgtcgcgcggccggcgcggtcgcgtcggaagaacagcgcttccgtaatgcgctgccatgccggcataggtgcgattgacctgcggatcaaaatggcaggccttgatgacggcgaccttggcgttatcgggaaccagcagcgccggcgcaccaccaaaggcctcaagcgccagcaggtggcattcaatcc

SEQ ID NO: 38459 - DNA, 260 bp, Unknown
  Description of Unknown: RightRegion for integrase A1027 sequence
tatggtagccgccaaccccggttaattgacgctcaacaaatccaacaaggtgcatcgtgatgtctgctccttgtcacgcggacgtcggggccgcgtcggcaggacggcactgccatagtgagccgccatcgcgcaatatgtccggtttacctggggatcgaagtggcaggccttgatgatcgccaccttggcattgtcgggaaccagcaaggctggcgcaccgccaaagaactccagcgcctggatatggcattcaatcc

SEQ ID NO: 38460 - DNA, 260 bp, Unknown
  Description of Unknown: RightRegion for integrase A1028 sequence
tatggtagccgccaaccccggttaatggacgctcaacaaatccaacaaggtgcatcgtgatgtctgctccttgtcccgcgggcgtcgcggccgcgtcggcaagacggcgctgccataatgggccgccatcccgcaatacgtccggttgacctggggatcgaagtggcaggccttgatgatcgctaccttggcattgtcgggaaccagcaaggctggcgcaccgccaaagaactccagcgccaggatatggcattcaatcc

SEQ ID NO: 38461 - DNA, 260 bp, Unknown
  Description of Unknown: RightRegion for integrase A1029 sequence
tatggtagccgcaaaccccggttaattgacgctcaaccaatccaacaaggtgcatcgtgatgtctgctccttgtcccgcgggcgtcgcggccgcgtcggcaagacggcgctgccataatgggccgccatcccgcaatacgtccggtttacctggggatcgaagtggcaggccttgatgatcgctaccttggcattgtcgggaaccagcaaggctggcgcaccgccaaagaactccagcgccaggatatggcattcaatcc

SEQ ID NO: 38462 - DNA, 260 bp, Unknown
  Description of Unknown: RightRegion for integrase A1030 sequence
tatggtagccgcaaaccccggctaattgacgctcaaccaatccaacaaggtgcatcgtgatgtctgctccttcgactgtgggcttcgcaccggtgtcgtgcaaggttccatgccgatgtcgcggagcaaggatgcggtgtccctggcaacaaagcaggagccgttgtcggtgagccattcgatgggctcggacagcatgttgatgcggccgaagcggttctccactgctgtgatcacgaggtcctgcacgtcctggctgt

SEQ ID NO: 38463 - DNA, 260 bp, Unknown
  Description of Unknown: RightRegion for integrase A1031 sequence
cgcaaagcaacacaagcaaccttcatcgccgctccaactaccggacaaggtgcaatgtgaaacctactccttgctctgcggacttctgacaggtgtcgtgacgggcttcaggccgatttcccgcgagaacgtcagcgtctcgtcggcaatgtagcaggaaccgttgtcgctcagccactcgatttcgctgtcagccttcaacgcaccggcgaaacggttttcgaccgcctgaagcatcacgtcgcgcaccatgtcaccgg

SEQ ID NO: 38464 - DNA, 260 bp, Unknown
  Description of Unknown: RightRegion for integrase A1032 sequence
ggcaaaaccacaggcaaatcaaccacccgcgagggaagtttccccgcacataccgcatgaggtgcaatatgcagcacactccttctcattcccccgcgcgatcgccaccgggcgaggctcgtagcgataatgaccggcgaactgcagcaaggtgggattgaagcggatcgcctgcccttgtcgctcgaggacggcgctcttcaggttgtcgtacagcagcactctcgccagccccccccaagcgccaaacgccccgacat

SEQ ID NO: 38465 - DNA, 260 bp, Unknown
  Description of Unknown: RightRegion for integrase A1033 sequence
aacgacgttgaagggcaactcccaatgtttaccgaggtttcggaaggaggtgcacaatgaacgccccatcgcccatggtcgaatctggttctccagccagttattgtcgatgggcacgtgcccgtcatcgagatagcgcgtgagcgcttcccaacgcttcaggctgtagtcgagcgcctttgcgattgccgatccttcggcaacgagcttgcgctgggtcaccatccaggcgtgcaacgcatcggcaacgggtctggatc

SEQ ID NO: 38466 - DNA, 260 bp, Unknown
  Description of Unknown: RightRegion for integrase A1034 sequence
cccgaaattttagacactttacgagaaaaaattcgccgtgtgcctgttaaatctgaataataccagtttgatagtgagccggaaataatagtttgtatacggttaaccccttggagtaattttgtactcaaggggttttactgtatatagggtgagggcttttcaataaacttttcaccatcaaaatgccaagcaattccatctgggtcgtgaagagaagtccattgcccaaaatttggagcatttttcttatgacgaag

SEQ ID NO: 38467 - DNA, 260 bp, Unknown
  Description of Unknown: RightRegion for integrase A1035 sequence
cccgaagttttagagactttacgtgaaaaaatccgccgcgtaccagttaaatctgaataataccagtttgatagtgacccgaaaacaatagtttgtatacggttaaccccttggagtaattttgtactcaaggggttttactgtatatcgggtgaggacttttcaataaatttttcaccatcaaaatgccaagcaattccatctgggtcatgaagagaagtccattgcccaaaattggaagcatttttcttatgacgaag

SEQ ID NO: 38468 - DNA, 260 bp, Unknown
  Description of Unknown: RightRegion for integrase A1036 sequence
gccagacgatcacgtcgcccgatatctcgagatccgcagcaaaatctctttgctttataagggcatcaccagatgagcagtatgaagcgccaacgtcgcagccggcaaaaagagagttcttggcgttgagcttgatcggccgcatcgcacgctcgacagcattggtgtgtgtgccttgcaaggcgcactgttctccctggtggaaccccaggccggctaactctcgctccagccggaagtattcggggcgggtcaggagg

SEQ ID NO: 38469 - DNA, 260 bp, Unknown
  Description of Unknown: RightRegion for integrase A1037 sequence
gccaggcgatcaagacgtccgatatctcaggatccggttcaaaatccccttttattttaaggacatcgtcagatgagcagtatgtcgcgccaacgtcgctaccggcaaagagcgcattgcggcgattcatggctggtcggcggatcgcgttttccaccaggttggagtcgatatcgacgtggccgtcgtccagaaacagccggaatccgtcctgccgcgtcagcatataggccagggcttttccgaggtcggacttgcgt

SEQ ID NO: 38470 - DNA, 260 bp, Unknown
  Description of Unknown: RightRegion for integrase A1038 sequence
gccaggcgatcaagacgtccgatatctcaggatccggttcaaaatccccttttattttaaggacatcatcagatgagcagtatgtcgcgccaacgtcggagccggcgaagagccagttctttcggccaattgcaatgccccgttcattctgcccatgtcggcgatgaagttgaggttctttatcgctggcatccttattttggccagagggtttccattcgccgtgttgaagaacgagcgacaggccggtttttgaaggt

SEQ ID NO: 38471 - DNA, 59 bp, Unknown
  Description of Unknown: RightRegion for integrase A1039 sequence
gaatgggacgaatatgaacgcaaccaggcgctgctcgccgccaacgcctatgggcaaaa

SEQ ID NO: 38472 - DNA, 260 bp, Unknown
  Description of Unknown: RightRegion for integrase A1040 sequence
aaggattgggtgcgcacttcagggcatctacagcggcaacattccaacactcaactgtgagaggtgcattatgagatcaccgtcggaataccgagtggcctttcgccaccactagctttggggatccatacgcgcagcaagggctgaggccgataagtcttggcctttaactcttgctgcaatctttccagccagtcgtttcgtccatgttcttcgatatcctcgaaacgctctcgatcgactcccggcgcaccgcggtt

SEQ ID NO: 38473 - DNA, 260 bp, Unknown
  Description of Unknown: RightRegion for integrase A1041 sequence
cccaaacaccccgcgggatcacaccccgatcagaaaaacctatccctctcaacaacatagacaaatgggtcttatgaaacaggattgtagtcgtgacgccaggcggccagcacggacctcgcttgaggcaggctcgtgaacaaggtctcgttcagacactcgtcccggagccgggcgttgaagctctcgacgaacccgttttgctggggcttgccgggcgcgatgtaatgccattccacgttccgctctttcgaccagcg

SEQ ID NO: 38474 - DNA, 260 bp, Unknown
  Description of Unknown: RightRegion for integrase A1042 sequence
aagggtcgcccgtgtcgcgttgttgacgcggacatgcttccaatgtttacagatacttgaatacggagtgcataatgaaacacgcttcgcgatgcagcgcaacgcgcgttcggcagcattgttggtgaggcagatcctgccgtcgtcaaggaagcgggtgaacgcgtcccagcgcttcagcatgtagaggcaggccttggtcagatcatggccgcgcgacagcttggccacctgcgcggtgagccaggtgtggagctcgg

SEQ ID NO: 38475 - DNA, 260 bp, Unknown
  Description of Unknown: RightRegion for integrase A1043 sequence
cgcgattgggtacgcacttcagggcatcttcagccgcaacattccaacattcaactgtgagaggtgcattatgaaatcaccgtcgggatgccaagctcgcgctcgccaccttccgccttctggatcgtcacccgtcgtaccggactgggccggtacgtcccccgcagcagttcctcacggatacgaggccactcggacgccagtttgcgcgacgtctggtcaatgtccagcccgtccacacccgccgaccccttgttcgc

SEQ ID NO: 38476 - DNA, 260 bp, Unknown
  Description of Unknown: RightRegion for integrase A1044 sequence
ccaaaataccccacgggatcacatcccagtcaacgaagcctattttcttcaaccacatagacagatgggtgttatgaagcaggattgtaatgccgtcgccaggcttcgatcagcaccttggcctcagcgggctgtagaagatctcgccattgagcagttcgtcgcgaagcgacccgttgaagctttcattatagccattctcccatggtgatcccggtgcgatgtagagcgtcttcacgccgatcctggccaaccattgt

SEQ ID NO: 38477 - DNA, 260 bp, Unknown
  Description of Unknown: RightRegion for integrase A1045 sequence
aagggccgcccgtgtcgcgctgctgatgcgggtacgcttccaatgtttacagacacttgaatatggagtgcacaatgaaacctgcttcaccaaaggtctgattgcccgctcagcggcattgttgctcatctcaagccgcccgtcagtggcgtaaaccgtgagagccttccagcgggaggtcatatagcggatcgccttggccaattcgcttttgccgctgatgcgcgtgagcgtaggcgctgtcgagccggtcgcacttc

SEQ ID NO: 38478 - DNA, 260 bp, Unknown
  Description of Unknown: RightRegion for integrase A1046 sequence
aagggccgcccgtgtcgcgctgctgatgcgggtacgcttccaatgtttacagacacttgaatatggagtgcacaatgaaacctgcttcgccaagggccggatcgcccgttcgactacattgctgtcgatctcaatccgcccgtcgtcgacaaaccgcgttagcccgtcccagcgcgagagcgcgtagcggatcgcctcggccagcttgctcttctggctgatcagaccgagcttggcgcgcaaccacggctcgagagctt

SEQ ID NO: 38479 - DNA, 260 bp, Unknown
  Description of Unknown: RightRegion for integrase A1047 sequence
ccaaaataccccacgggatcgcatcccgatcaacaaaccctattttcttcaaccacatagacagatgggtgttatgaagcaggattgtaataggtgatccatcggccaagaccagccttcagctccgatccggtctcgaaggcgtggaggtagacgcactcatacttcaaagatcgccagaggcgctcgatgaagacgttgtccatccatcgcccccgaccatccatgctgatgcggatttcagcgtcgcgcagcacgct

SEQ ID NO: 38480 - DNA, 260 bp, Unknown
  Description of Unknown: RightRegion for integrase A1048 sequence
aaaggtcgcccgtgtcgcgttgccgacgtggacacgcttccaatgtttacagatacttgacgagggagtgcataatgactcacgcatcgcgattgggcggattgaccgctcgacggtattggagtcgagctcgatgcggccgttttcgaggaagcgcgagagtccttcccatcgggagagcgtgtagcggatcgcctcggcgagcttggtcttctggctgatcaggccgagcttttcgcgcagccaaggctcgagctcag

SEQ ID NO: 38481 - DNA, 260 bp, Unknown
  Description of Unknown: RightRegion for integrase A1049 sequence
aaggcgcgcccgtgtcgcatcgccgacgcggagacgcttccaatgtttacagatacttaaagaaggagtgcgcaatgactcaggcccgccaagcggacgcatggctccttcagctatgttgttatcgatttcgacacggccatcgtcgatgtaaacgctcaatgctgcccatcgcgagagggcatatcgcattgcctcggcagcttctgcttttgtggcagcgtcgaaagcgtctcttctatccagctcttgagatccgc

SEQ ID NO: 38482 - DNA, 260 bp, Unknown
  Description of Unknown: RightRegion for integrase A1050 sequence
acagatcgcccgtgtcacgccgacggcgggaagcagatctcaatgttttcaagcacttaacgaagaggggcactatgagcaggtcattgccacaccgcgcagggcgcgctcggcagcgttgttgtcgatctcgatgcggccatcgtctcggtaacgcgtgagcgatttccagcgtgtcagcgagtagccgatcgccttggccagttccgacttcgtggacaccttgcccagcatgctcgtgagccaggcacgcaggtctt

SEQ ID NO: 38483 - DNA, 260 bp, Unknown
  Description of Unknown: RightRegion for integrase A1051 sequence
cccagacacccggcgggatcgcatcccgatcagcaaaacctcttttcttcaatagcatagaaagatgggcgttatgaagcatcgttgtacaacggtggttgcggggacccacataagccgagcccgacacttgttgtctgctgctgtataaacgctcacgacgaaagccttcttcggccccaaagcccttgggcgaccttctctcgtcgtcatagctggcgacatgacatcgaacgtctcgacctgatgggaagtactcg

SEQ ID NO: 38484 - DNA, 260 bp, Unknown
  Description of Unknown: RightRegion for integrase A1052 sequence
gcgcggcgcctcagacgtccgccgtccggcaatccgctacaaaaagaactggaactctaacgagatagaaaggtgagcattatgaagcgggctcggttgccccggtgatgagcaaattctcgttgcggcggatccagtcaccgacgatgagcctggcgaagacggcgcgatcgatgccgcgtggcgtgcgccaatcgacatcttccacgcatgcggtctggcgcagcgcggcgaacttgaggcgggtcgtaagacgtttg

SEQ ID NO: 38485 - DNA, 260 bp, Unknown
  Description of Unknown: RightRegion for integrase A1053 sequence
acactcagcccgtgtcgggccgtcagcgagaagcagatgtcaatgttttcaagcacttaacgaagaggggcattatgaacacgccattgcccatggccgaatcagattttcgagatggttgttatcaatctggacgttgccgtcggccagataagttgtcagcgcttcccagcggttcaggctgtagtcaatcgctttggccgtggcactgccctcgggcacgcgttgcctctcccgcttcagccaggcgtgcaggtcct

SEQ ID NO: 38486 - DNA, 260 bp, Unknown
  Description of Unknown: RightRegion for integrase A1054 sequence
aagggccgcccgtgtcgcattgctgacaccgagacgcttccaatgtttacagatacttaaagagggagtgcacaatgactcaggtacggcaacgccgcgcagggctcgttcggcggcattgttcgtcagacacagtctgccgtcgtcgaggaaccgggcgaaggcttcccagcgaccctccttctcgaacatgtagttgatcgcctcggcgacggggttgtgcttcgacatttgcccgcgctgggccatgagccaatcgt

SEQ ID NO: 38487 - DNA, 260 bp, Unknown
  Description of Unknown: RightRegion for integrase A1055 sequence
aagggccgcccgtgtcgcattgctgacaccgagacgcttccaatgtttacagatacttaaagagggagtgcacaatgactcaggtacggcaacgccgcgcagggctcgttcggcggcattgttcgtcagacacagtctgccgtcgtcgaggaaccgggcgaaggcttcccagcgaccctccttctcgaacatgtagttgatcggctcggcgacggggttgtgcttcgacatttgcccgcgctgggccatgagccaatcgt

SEQ ID NO: 38488 - DNA, 260 bp, Unknown
  Description of Unknown: RightRegion for integrase A1056 sequence
aagggccgcccgtgtcgcatcgctgacacggagacgcttccaatgtttacagatacttagaaaaggagtgcacaatgactcaggtccgcctatcggacgtagtgcccgctcggcggcattgttgtcgatcgcgacgcggccttcttcgaggaacagacagagcgaagaccatcggctcaatccgtagcggaaagctgtcgccagatcgcttttgcccggaatgcgcgtgagttgagcttcagcccagtggcggaatgcat

SEQ ID NO: 38489 - DNA, 260 bp, Unknown
  Description of Unknown: RightRegion for integrase A1057 sequence
aaaggacgcccgtgtcgcgttgctgacccggatacgcttccaatgtttacagacacttagagaaggagtgcacaatgactcaggtccgcctatcggacgcagtgctcgctcagcggcattgttgtcgatggcgacacgaccgtcttgcaggaacaggcagaacgaggaccatttgctcaaaccgtaccggaaggctgccgccgatcgcccttgccaggaatgcgagtcagttgagcctctgcccagatgcggaatgcttc

SEQ ID NO: 38490 - DNA, 260 bp, Unknown
  Description of Unknown: RightRegion for integrase A1058 sequence
aagggccgcccgtgtcgcattgctgacacggagacgcttccaatgtttacagatacttagagaaggagcgcacaatgactcaggtccggcgaagcctcgcaacactcgctcggcagcattgttcgtgaggcagatcctgccgtcttccaagaatgacgcgaagccgtcccagcgcttcagcatgtaatcgatcgcctcggcaaccggagagctgcgcgacagccttgcccgctcggcccgcagccattcctggaactcta

SEQ ID NO: 38491 - DNA, 260 bp, Unknown
  Description of Unknown: RightRegion for integrase A1059 sequence
aagggccgcccgtgtcgcattcccgacacggagacgcttccaatgtttacagatacttaaagagggagtgcacaatgactcaggtccggcgctaaaccggaagaatgctctcttcgctggtcatcacaccggagctgagaattgggcgaccatcgcctcgctgatcgagacgtgcaagctcaatgccgtcgatccgtttgcgtatttgaccagcacgctcaccgccatcgttaacggccacaagcagagccagattgagg

SEQ ID NO: 38492 - DNA, 260 bp, Unknown
  Description of Unknown: RightRegion for integrase A1060 sequence
aggagcgaacacagtccattatcacaatcacaggatcagcagatccagctttttcaataacatagcgaggtgtgcattatgtcgtgggatcgctgggaccgagagcaatgacgttctcgcgtcgctcgatccactcgcatcgggccaactccagcacctgcatcttgttgagcttcgggatagcggcgaagtcgaaactgtcgaggcttttgacgaccgggaatttggccgccttgatccggcgatcgacctttcggcga

SEQ ID NO: 38493 - DNA, 260 bp, Unknown
  Description of Unknown: RightRegion for integrase A1061 sequence
aagggtcgcccgtgtcgcaccactgacacggagacgcttccaatgtttacagacacttagagagggagtgcacaatgactcaggtccgccaaaaactctgatgtcgcgctccaggaggttgttgtcgatcggcatcctgccatcgtccgtgtagcgcgtcagataatcccactggttcagagtgtaggacacggcatcgcccagcttggtgtccggcaagaccttcggcgcgatttcatcgagccataccttgagagcgg

SEQ ID NO: 38494 - DNA, 260 bp, Unknown
  Description of Unknown: RightRegion for integrase A1062 sequence
cacagaggcccgtgtcgcatcaaaatggaaaaccaaaagtccctgtttccggacatttgaagaggaggtgtagtatgaatcggtcgttgccacgcatcgcatggcacgctccgcaatgttgttatcgatctccagacgcccatcatcgaggaagcgcgtgagcgccacccagcgcttgcggccataggcgatcgctttcgccatctcggacttgggcgagaggcggcgcagggcatcgtcaagtgcttgccgcagctcat

SEQ ID NO: 38495 - DNA, 260 bp, Unknown; identical to SEQ ID NO: 38487
  Description of Unknown: RightRegion for integrase A1063 sequence

SEQ ID NO: 38496 - DNA, 260 bp, Unknown
  Description of Unknown: RightRegion for integrase A1064 sequence
tacagaggcccgtgtcgcattaaaatggaaaaccaaaagtccctgtttccggacgtttgaagaggaggtgcataatgaaccagtcgttgccgcctcgcgaatggcggtgctgtcatagcctttgtcgccgagcagggtagcgccctcggggatggcctctatcagcgcttcagcttcgcacgcatcatggacctgcccacccgtcagtcgcaggccgacaggacgcccataagcgtcgacaagagcgtggagtttggtcg

SEQ ID NO: 38497 - DNA, 260 bp, Unknown
  Description of Unknown: RightRegion for integrase A1065 sequence
tacagaggcccgtgtcgcattaaaatggaaaaccaaaagtccctgtttccggacgtttgaagaggaggtgcataatgaaccagtcgttgcaaaaaccctgatgtcgcgttcgagaagattgttgtcgatcggcatcctgccgtcttcgacgtagcgcgtcaggtattcccactggttgagggtgtaggagaccgcatcgccaagcttggtgtcgggcacaaccttgggcgcgatggcatcgagccatgccttgagggcat

SEQ ID NO: 38498 - DNA, 260 bp, Unknown
  Description of Unknown: RightRegion for integrase A1066 sequence
caaaagctcaaagccggcaaggtggaccgcctctctcccgtccctcggttggcttgttgaggagggcactaagatgcgtgatcgaacatcttgttcgcgtacatgtcgacgaccgggtgctcatatccgtcgagagccttcgtctcgagagcggtgtagacctcggtgaacgccatcgggacggcgttgagtcccatcgcattgaagctggccagggccatcgggctttgcatcacgcgaaccttgagccctttcatgtc

SEQ ID NO: 38499 - DNA, 260 bp, Unknown
  Description of Unknown: RightRegion for integrase A1067 sequence
tacagaggcccgtgtcgcatcaaaatggaaaaccaaaagtccctgtttccggacgtttgaagaggaggtgcataatgaaccagtcgttgcaacgctgcgcagttggcgctccgcagcgttgttcgagagacatatccggccatcggcgaggaaggtggtgaagcccgcccagtcgttctggaggtaggcgatggccttggccacggcatcgtgacgagagagcttgctacgcgtctcacgcatccatgcctctagttcag

SEQ ID NO: 38500 - DNA, 260 bp, Unknown
  Description of Unknown: RightRegion for integrase A1068 sequence
aacggtggcccgtgtcacctcgaaacgcaaaatcaaatcccaatgtttccaaatacttgagaaggaggcgtacaatgaatcagacatcgcaaaaatcctgatgtcacgctcaagaaggttgttgtcgatcggcatcctgccgtcttcggtgtagcagtgttggtttccacgcagaactgagccggttccaacctttcctcgcgtgttttcagcgtgatccgacgctggcatcgtcgagagcatctatcgatccgggagat

SEQ ID NO: 38501 - DNA, 260 bp, Unknown
  Description of Unknown: RightRegion for integrase A1069 sequence
cctagataccccacgggatcgcctccagatcaggaaaatctattcccttcaacaacatagaaagatgggcgttatgaaacaggattgtaatcgtcgacccattcggcgatggcgctgcgggcatggccgagaccgaagaacaggctttcgttcagcagttcgtcgcgcatccttccgttgaggactcgacataaccgtgtctcacatcggctttcccggtgcgatgtagtgccagtcgaccttgtggtccttcgcccagg

SEQ ID NO: 38502 - DNA, 260 bp, Unknown
  Description of Unknown: RightRegion for integrase A1070 sequence
cctcgccaccccgcgggatcgcctccagatcaggaaaacctattcccttcaatgacatagaaagatgggtgttatgaaacaggattgtaatcgctgcgccagtttgaaagcgctgatcgagcgtgggtcaatgacgagaagagcgtttcattcaagagctcgtcgcgcagccgaccattgaagctttcgatgaaggcgttctggatcggtttgcctggtgcgatgtagtgccaatcgactttggtccggtcggcccattg

SEQ ID NO: 38503 - DNA, 260 bp, Unknown
  Description of Unknown: RightRegion for integrase A1071 sequence
cctcgccaccccgcgggatcgcctccagatcaggaaaatctatttctttcaatgacatagaaagatgggtgttatgaaacaggattgtagtcgtccgcccattcggcaatggcgcttcgggcatgatcgagaccgaagaacaggctttcgttgagcagttcgtcgcgcatccggccgttgaagctctcgacatagccgttctgcatcggcttccccggcgcgatgtagtgccagtcaaccttgtgatccttcgaccaagc

SEQ ID NO: 38504 - DNA, 260 bp, Unknown
  Description of Unknown: RightRegion for integrase A1072 sequence
ccccgacaccccgcgggatcgcctccagatcaggaaaacctattcccttcaatggcatagaaagatgggtgttatgaaacaggattgtagtcgtttctccagtcttcgataatctccctcgcatggcggtagctggtgaagaggtgctcgttaaggcattcatcgcgcagcctaccgttaaagctctccacaaagccattttgcatgggcttgcccggcgcaatgtagtgccactcgacggcgtggtcctgttgccattt

SEQ ID NO: 38505 - DNA, 260 bp, Unknown
  Description of Unknown: RightRegion for integrase A1073 sequence
cccagacaccccgcgggatcgcctcaaaatcaaggaaacctatttacttcaacaacatagaaagatgggcgttatgaaacaggattgtagtatctacgccaatcctccatcttttcgcgggcatccgcaagggtcaggaaccaatcctggttcaggcattctgcacggaagcggccattgaacgcttcgatgaaagcattatcagtcggcttgccggggcgtgagaagtccaacgtcacacccttggaataggcccacag

SEQ ID NO: 38506 - DNA, 260 bp, Unknown
  Description of Unknown: RightRegion for integrase A1074 sequence
cctcgccaccccgcgggatcgcctccagatcaggaaaatctattcctttcgatgacataggaagatgggagttatgaaacaggattgtagtatctacgccaatcctccatcttttcgcgggcatccgcaagggtcaggaaccaatgctggttcaggcattctgcacggaagcggccattgaacgcttcgatgaaagcattatcagtcggcttgccggggcgtgagaagtccaacgtcacacccttggaataggcccacag

SEQ ID NO: 38507 - DNA, 260 bp, Unknown
  Description of Unknown: RightRegion for integrase A1075 sequence
cctcgacaccccacaggatcgcatccagatcaggaaaacttattcccttcaacaacatagaaagatgggcgttatgaaacaggattgtaatcgtccgtccattcagcaatggcgcgcttcgggcatgatcgaggccgaaaaacaggctttcgttgagcaactcgtcgttgttgcgaccccagggaatcatcggttcaacccaaaagccagagcgtttttcagcagcctgctagaccgtctttccgacacatgtccttcac

SEQ ID NO: 38508 - DNA, 260 bp, Unknown
  Description of Unknown: RightRegion for integrase A1076 sequence
cctcgccaccccgcgggatcgcctccagatcaggaaaacctattcccttcaacaacatagaaagataggcgttatgaaacaggattgtactctctacgccaatcctccatcttcgcccgcgcgtcgtcaaggctcatgaaccaatgagcgttcaggcactcggcgcggaacttgccgtagctttcgatgtagctgttgtcggtgggtttgcctggtcgcgagaagtgaagcaggacacccttgtggtaggcccacaggtc

SEQ ID NO: 38509 - DNA, 260 bp, Unknown
  Description of Unknown: RightRegion for integrase A1077 sequence
cctcgacaccccacaggatcgcatccagatcaggaaagcttattcccttcaacaacatagaaagatgggcgttatgaaacaggattgtaatcgctgcgccagtctgaaagagctgatcgagcgtgggtcagtgacgagaagagcgtttcattcaagagttcgtcgcgcagccgaccattgaagctttcgatgaaggcgttctggatcggtttgcctggtgcgatgtagtgccaatcgactttggtccggccggcccattg

SEQ ID NO: 38510 - DNA, 260 bp, Unknown
  Description of Unknown: RightRegion for integrase A1078 sequence
cccaggcaccccgcaggatcacatcccgatcagaataccctattccctacaacagcatagacagatgggtgttatgaaacaggattgtaatgccggcgccaggcttcgatcaggatctgggcttcagccaaggtgtagaagatctccccgttcaagagttcgtcgcgcatcgagccattgaaggactcgcagtagccattctcccatgggctgccgggtgtaatgtagagcgtcttcacaccgatcctggtcagccattc

SEQ ID NO: 38511 - DNA, 260 bp, Unknown
  Description of Unknown: RightRegion for integrase A1079 sequence
ccgtcggtacgccgtccggtaacagacgatccggatcagcagacctttgattttcaatgacgtagcgaggtgggcatcatgacgcgggaacgggctggccgaggaaatggaccacctcgtgccggtcgacgaagtcgagctgcgccaaggtcatgatcctgtcgcggtcgagcgaaggctggaaggagaagtcgaagccggtgagcgtcttgatggagagaagccggcccatcttcagggctgccttgatgcggcgcccc

SEQ ID NO: 38512 - DNA, 260 bp, Unknown
  Description of Unknown: RightRegion for integrase A1080 sequence
cctcgacaccccacaggatcgcatccagatcaggaaaacttattcccttcaacaacatagatagatgggcgttatgaaacaggattgtaatcgctgcgccagtctgaaagagctgatcgagcgtgggtcagtgacgagaagagtgtttcattcaagagttcgtcgcgcagccgaccattgaagctttcgatgaaggcgttctggatcggtttgcctggtgcgatgtagtgccaatcgactttggtccggccggcccattg

SEQ ID NO: 38513 - DNA, 260 bp, Unknown
  Description of Unknown: RightRegion for integrase A1081 sequence
ctcgcaaaaggagtcggcggccgatatggtagccgccaaccccggttaattgacgcttgacaaatccaacaaggtgcatcgtgatgtctgctccttgtcacgcgggcgtcgcggccgcgtcggcaagacggcgctgccataatgggccgccatcccgcaatacgtccggttgacctggggatcgaagtggcaggccttgatgatcgctaccttggcattgtcgggaaccagcaaggctggcgcaccgccaaagaactcca

SEQ ID NO: 38514 - DNA, 260 bp, Unknown
  Description of Unknown: RightRegion for integrase A1082 sequence
cgccaacaaacgcaaactgagccaagaacatcaactggcgaggaaagaggtgtagtatgaacgctgatcgttgtatgccatcaccagaccgctgccatcccagtagatcagcttcaaccggtccgcacagtgcgcttcataatgcatccctccatcagattccgggcaaccggacgactttatcgtattgataatcttcataaaacttcgggcgtcgatcgatgacaccctgcacccctatccggacggcttccgaggat

SEQ ID NO: 38515 - DNA, 260 bp, Unknown
  Description of Unknown: RightRegion for integrase A1083 sequence
aaagggcgcccgtgtcagtcgccgccggaaagtcaaattccaatgtttacagatacttgaagagggggtgtataatgaacactgcgttccaaaaatcctaatatcgcgttcgagaaggttgttgtcgatcgacatcctgccgtcttcggtgtagcgcgtcaggtattcccactggttcagggtgtaggatacggcgtcgccgatcttgctatcgggcaagaccttcggcgcgatgtcatcgagccatgccttgagagcga

SEQ ID NO: 38516 - DNA, 260 bp, Unknown
  Description of Unknown: RightRegion for integrase A1084 sequence
gcccgccgtctgagacgtccgccgtccagtaacccgctgcaaaaaactcttgaactttaacgacatggacaggtgagcattatgaagccggctcgctgggaccaagcgcaatgacattctcgcgccgctcgatccattcgcaacgcgccagttccagcacctgcatcttgttgagctttgggatggcggtgaagtcgaagctgtccaggcttttgacgaccgggaaccttgccgccttgatgcggcgctcgaccttgcgg

SEQ ID NO: 38517 - DNA, 260 bp, Unknown
  Description of Unknown: RightRegion for integrase A1085 sequence
cgtgttaagttcatcaacggaaagacggtcaaaagtgaaaggagcaccaaccatgagtaatataaagacagcggcaaacgtgacacttatccctgcaaaggagcaggcaaacagcgtatttacaggcaaaaagctgaaagtggcggcttattgcagggtcagcacagacgaaaccgagcagatgaacagcttcggagtacagatcgcgtactacaccgactacatcggcagccgacccgactggcagatgatcggcattt

SEQ ID NO: 38518 - DNA, 260 bp, Unknown
  Description of Unknown: RightRegion for integrase A1086 sequence
gccagcgacctggctgggactgtcaggaattctgtgcggtgggccggtttcatcagttgaagaaccgctcgccaaagatgacggcgaactgtgtctttgcctcgacccattcccgcggcgcccgtttccattgctcggccgcgttgttaagaacgagatataacagcttcatcgcggcttcgtcaccagggaaatgcccgcgggaacgcacagctcgccgaagcttcgagttgagggcctctattgcgttcgtcgtgtag

SEQ ID NO: 38519 - DNA, 260 bp, Unknown
  Description of Unknown: RightRegion for integrase A1087 sequence
atgagtcagcttcgcaaccgggtacgacgcaccaagcgttcgaagaaggaggcatcatgaagtcatcggctcgccgatcagcgcgtgccattgatcgacggggagctggctggtgacgatggtggagcggtggccgtagcggtcctcgaggatctccaggaggtcgtggcgggccgcggcgtcgagcggctcgaggccccagtcgtctgatggcaagcacaatttggcacttcgaacgacttggacggctgcgatcgtat

SEQ ID NO: 38520 - DNA, 260 bp, Unknown; identical to SEQ ID NO: 38469
  Description of Unknown: RightRegion for integrase A1088 sequence

SEQ ID NO: 38521 - DNA, 260 bp, Unknown
  Description of Unknown: RightRegion for integrase A1089 sequence
acaaagacgcgcaagtcgaaaccactacccaaaccggcccgcacgcctcgaatgaaatgagcgcaagcgaattcggataataaggcggcccctatcgtgggccgctttttattcgtcgtcgctatcctgcaagagtccttcgggcgtagagtagatccgtaataggctttcgccgacaaggacctgtcggtacgataggatagccaagtcccaaatttcttgtgctacttctggccccgcgtcgaggactttgccatctt

SEQ ID NO: 38522 - DNA, 260 bp, Unknown
  Description of Unknown: RightRegion for integrase A1090 sequence
aatctgggcggtgcggcgaagttactcgggataacgccaaagggtgatgtcacgttgtgagcggcttaacggttgtcggataatgggttgggatgaacagtcctgccgtcagctacaagaaccaccgctttccaccgcagatcatcgcccgtgcggtctggctgtatttccggttccctttgagcctgcggatggtcgaggaaatgttgttggagcgcggcattgtcgtctcctatgaaacgatccggcgatggggccgc

SEQ ID NO: 38523 - DNA, 260 bp, Unknown
  Description of Unknown: RightRegion for integrase A1091 sequence
ttcgtcccggtcagcagtttaccgcagagagagccgatgaaaggagtacaaacagcatgaatatcacttacacacagaacggcgattatcttatcccgaacatcattatccgcaagaccaagcccctcgggcactacggcagactccgcaaagcgtatctggaaatgcaccgtccgatactgttcaatgagctggtactatccgacaagctctttgagcattgcgccgagattgacgaagcggcacgaaatcgcatggag

SEQ ID NO: 38524 - DNA, 260 bp, Unknown; identical to SEQ ID NO: 38523
  Description of Unknown: RightRegion for integrase A1092 sequence

SEQ ID NO: 38525 - DNA, 260 bp, Unknown; identical to SEQ ID NO: 38434
  Description of Unknown: RightRegion for integrase A1093 sequence

SEQ ID NO: 38526 - DNA, 260 bp, Unknown
  Description of Unknown: RightRegion for integrase A1094 sequence
cgcatgacgctgtatcgtcgcctgcaacggttagggattcaactgcccgagcggcagtagagacgggccagcctggctggcccgtgcgtgatcactgtggcggacgtaccagaattttgacctgctgtttctctttcaccagcgcttcaaagccctgttcaaccagatcagccagttcaatacgtttcgtcaccagtttgtcagcctggaagtagccctgcgccatcagttccatcactgccgggaagatatggcgatag

SEQ ID NO: 38527 - DNA, 260 bp, Unknown
  Description of Unknown: RightRegion for integrase A1095 sequence
aaacgcctcctgatccgcggcgaacccgcccagccacgaccgagcgaaccgaaggactgaaggggagggggattggtccgacgatccagaggaggatcgcaggagaccccccatgcccatcacgatcgaccttggcggcgcccccgccaacgaagactgtgcccagctcggccacacacccgatttcgccgccgtcaatcgcctggaggtcgacgcctaccgcgccgccctgattgcgctgttcggaacgccgcccgaag

SEQ ID NO: 38528 - DNA, 260 bp, Unknown
  Description of Unknown: RightRegion for integrase A1096 sequence
agctctgttgtccaaactaaacacagaacatcatttagatatagaaataggggaagatgaattatctgaaattgacttttcaaaagacgcaacttatggagaaattaaaaagtatgtgttagataaatacggactaaaagtttcaagcctatatatcgcacaagtaaaaaggaaacatggtctaatagagagagaaaattataattttagtaagaaagaaaatcaaagagtgccaaattgcccagaagaaaaagaaaaag

SEQ ID NO: 38529 - DNA, 260 bp, Unknown
  Description of Unknown: RightRegion for integrase A1097 sequence
gcctgcaaccgaagaaaattgctgcttgtcagcgggttcgttgaaaggctcgttgcatgacatagtcgattgataaacagtcgtttttatcaatattttgtctcgcctcagccttgccggtcagaccgtgtcagtcagccagtcctccgttcgaagaccctccacccgctgaaattcccgcagattgccggtcaccacaatcagccctttgctccgggcatgcccggcaatcatgagatcatacggacctatgatacggc

SEQ ID NO: 38530 - DNA, 260 bp, Unknown
  Description of Unknown: RightRegion for integrase A1098 sequence
tgcgccggatgggccggcgccgagcctcccgcacaggggacgagccatgcagcagaatagcaaagtgtttgtcggtctggatacgtccaaactgaagatcgcggtcgccgtggctgaagacggccgtcagggtgaagtccgttttctgggcgagatcgacaacacgcccgaggcagtgcggcgcctcgtcagtaagctcagtggcaagcatcgcgagttgctgttctgctacgaggccggcccgaccggctatggcctgc

SEQ ID NO: 38531 - DNA, 260 bp, Unknown
  Description of Unknown: RightRegion for integrase A1099 sequence
gagggctgcaaatccttgcacctgacggcaaaggaagcggtggcgcggaacggcttatgaggcttcgtgccaatgggatcaggcactttgtctagcatgtgtcccaaccacaggatggtccggagtgggtctcgcagtgatattctcagagaattcgacacgtccggtttcgtgaggattgctgcctttgggcttacgtctcaggggtgccagaactagacgttccttggttcaaggaaatgcgtcagccgttcgagccc

SEQ ID NO: 38532 - DNA, 260 bp, Unknown
  Description of Unknown: RightRegion for integrase A1100 sequence
gttgacaaattagtgttggttgcgggggcaggatttgaacctgcggccttcaggttatgagcctgacgagctaccgggctgctccaccccgcggccgttttgcgtcttgagcgattgtttgcttctgacgcggatgattttgatcgttctggagatttcgtttcttttcaggtctggcggcgacctactctcccacgtcttgagacgcagtaccattggcgcgacggcacttaacggccgagttcgggatgggatcgggt

SEQ ID NO: 38533 - DNA, 260 bp, Unknown
  Description of Unknown: RightRegion for integrase A1101 sequence
gatgtgctgcattcagagccgaagtgcgagtgtagtaaatggaaaatggaattgatttagaaaacgacttggtggcgtttctgaaagatatagtcaaaaatgatcatgattatatttctgaagttatagcagagtctcacagtattttttctctgaatgggaacaggaatggagacgaggaggattatacatatcttgaagatgattacaactgaatcaaaagtataaaacaatgaaaggaaatgaaaattatgtctgaa

SEQ ID NO: 38534 - DNA, 260 bp, Unknown
  Description of Unknown: RightRegion for integrase A1102 sequence
gacataccaaaaccggcaaaggcaaaggcaaaggcaaaacagaaaaagaaaacggtctgaatctgaatcagaacgccatgccgggtggtattggcatggcgtcagaaatgcattcagcgcagaaacgttatttttttctgcttcttcaaggaggtgaacaacatagtcccacaagccgatgttcatcttcttggcagacaaaaggaatttattcaggtcattgtgttcatgaacaagcaagtatgactcaaggcttcttg

SEQ ID NO: 38535 - DNA, 260 bp, Unknown
  Description of Unknown: RightRegion for integrase A1103 sequence
ctgaaagacataccaaaaccggcaaaggcaaaggcaaaacagaaaaagaaaacggtctgaatctgaatcagaacgccatgccgggtggtattggcatggcgtcagaaatgcattcagcgcagaaacgttatttttttctgcttcttcaaggaagacaaggcaacacgcgaaggcagattattcgccatcaatacgcaagcctgtttgaagcatctgcataacagccagattaatcacagcggccctgctttgcccaagat

SEQ ID NO: 38536 - DNA, 260 bp, Unknown
  Description of Unknown: RightRegion for integrase A1104 sequence
cccgagcaagtaaagatggttgcggggacaggatttgaacctgtgaccttcaggttatgagcctgacgagctaccgggctgctccaccccgcggtggtttgttatcgttcagagattgagcttctcgtcaggtctggcggtgacctactctcccacgtcttgagacgcagtaccattggcgcgccggcacttaacggccgagttcgggatgggatcgggtgttttgctcgtgctatgaccaccagacctgaggagaagct

SEQ ID NO: 38537 - DNA, 260 bp, Unknown
  Description of Unknown: RightRegion for integrase A1105 sequence
agcatgaacgagaaatatgacataacatatcatgtggtagatttgagggaacaagaatgaatgcagtagagataattgatttcaataaacttgagtcaaaagatagattaaagaatgtttgtgcttatgctagggtttcaacaaaaaaagaactccaagaaacttctctagacttacaagttgaaacatatacgaaaatgataatggataatcctaaatggaacttcgttggtgtttattctgatgttgggaaaagtgga

SEQ ID NO: 38538 - DNA, 260 bp, Unknown
  Description of Unknown: RightRegion for integrase A1106 sequence
ttccgcatcgagatcacgggcgacctgctcaccttccttctgccgtccgcgtcaaagtagggcactgacggcaccacgccaccgaagcctccccacggggaggcttcatgcatttcggcgtccaggtcgctcggatttcgcagcaatctcaacacgctgaggcggaaccgcgccatctgccaggagtcccgccgaaacccgtagatttcgggggtatcaggggcatgataccaaccagatgatctcccgcctcgcagagg

SEQ ID NO: 38539 - DNA, 260 bp, Unknown
  Description of Unknown: RightRegion for integrase A1107 sequence
gaagtggtagcgggagagggctaccgccaattcaccgctgctaccgagttcgtctgttgaatgtactcgcaagcagggacgacagaatcacatcctgtcccctggctgtggtggccggctgatttgaactgtcatcagaggcccgcaaagttcccgtaaaccagacatgcaaacgataacacttgaggccgcggttgcgccaggttcggtgaatcttccatgtgccgcacgccaccttggctcccggccttcattgtcgt

SEQ ID NO: 38540 - DNA, 260 bp, Unknown
  Description of Unknown: RightRegion for integrase A1108 sequence
ggaatgtcggtttcggtggttgcgggagtaggatttgaacctacgaccttcaggttatgagcctgacgagctaccgggctgctccatcccgcgacacgtggttgccccttggttttggggtaacgcaaaaaaggcggctttggggccgccttttttgacaatgtgaatgggtttttgctgattttgcgcgagcttcaatgcctggcgacgccctactcttccagtgcttgagcaatagtaccatcggcgcagactggttt

SEQ ID NO: 38541 - DNA, 260 bp, Unknown
  Description of Unknown: RightRegion for integrase A1109 sequence
aatataagtttggacaatgatgaacaagttgaggctatagcgttgatacaaaagatgtaaatttagaaatccttcatttcaagcaattttataagcattttgtcttcgataaagatgaagaaggatacgtcaaaaagactcaaaaaaacttcatggatgtaagagttgttttgagactagtatgaggagacacaaagaaaaatttaataagataaactcattttgtactttctacaagagtggcttaaaaagctgctctt

SEQ ID NO: 38542 - DNA, 260 bp, Unknown
  Description of Unknown: RightRegion for integrase A1110 sequence
gcaggccgaactttgcaccattgtccaacacgtcctgatcctgcaccggatgtggcgtgacaacacggacttccggtggtcgcgccaggaagggcagcccgcatgagatagacacccaaagagatccgcctgatctggcggtacgatgtcccttgtcgggacgaggcagcagccatcgcgtgggcaccgttgcggcctgaaacctgaacctcagggagcagattgaccgcgtatgcaacatggcgaggctgaggcttccg

SEQ ID NO: 38543 - DNA, 260 bp, Unknown
  Description of Unknown: RightRegion for integrase A1111 sequence
ctttcgcaagaatcgttggttgcggggataggatttgaacctatgaccttcaggttatgagcctgacgagacggcatctgacgggatgctgccgcccgggcctcgtgcaaaagagcttgataattgattgaccacggtcgccgacgttatcgaggagacatccctctcgtcgaactttgatcggccagttgtggaaaccaaggggttacgctggatctggtagcggaggagggattcgaacccgctcgaccgctccctgg

SEQ ID NO: 38544 - DNA, 260 bp, Unknown
  Description of Unknown: RightRegion for integrase A1112 sequence
ggaaatacttatactccagacgaatacattttaatgattcaaaagactttaacaaaataacccctggtaactacaaaaggtttacccctcctgtagataagatataatgttctcaggaggatttatgactatttacgcctatacccgcgtttcaaaagccgaaaatgaaaccggcacgacaaataatcagattattaacattgaatcacaattaaagatagataacgtatattctgatgtcaatatttctggctcaatgc

SEQ ID NO: 38545 - DNA, 260 bp, Unknown
  Description of Unknown: RightRegion for integrase A1113 sequence
gccgccctccagagtgccgggagcattccgggccagatggcggggagcatggtctcgtgatgtacggctaccaccggaccaagggcgcccccatcgtcggcgccctcccggggcaggacggccccttcggccaccggcccgcgcccgacgaggacgacgacgccctcctggacatcgaggagccggacgccatggtgcccgcgccccgggacgggagcgggcggtgacgacgttgtggcggcaggtcctggccgcgctca

SEQ ID NO: 38546 - DNA, 260 bp, Unknown
  Description of Unknown: RightRegion for integrase A1114 sequence
acaccttacaagattagaaaaacactatttgaaacaacaagtaaaatttcatgcttttagctaattgtatcaagcagaaaactgtgttatattaaaagtgcgacatagtcgcaacttatcccttacatagcatgtgtgtatttacacacacatccccttccttaaggccaccgagaggtggtctttttattatgttttctatcaagttcaaatccgatagcgacctcaaaaaatagccattttaggcaaaagttcaaatc

SEQ ID NO: 38547 - DNA, 260 bp, Unknown
  Description of Unknown: RightRegion for integrase A1115 sequence
gtagaaacggcggcgttcggcgttcatagttctgttctgaaatggcgcgccatttgctgaattgccacccgcgttcaagaagcttcaatccatcttgctgcaacgccccggcggtgaccgtgacatggtggaaattctggcccttgtattgcaccacgatgaaggtgcggtactcagtgctgtggaattggcattggagtgtggcaagccatcgaaggagcatgtgcttaatctgttgggacgtttgaccgaagaacctc

SEQ ID NO: 38548 - DNA, 260 bp, Unknown
  Description of Unknown: RightRegion for integrase A1116 sequence
acccctatcctaaggtttaatttcatttttgacctcacagccactaataatttccactaagaaaagtagtaagtatcttaaaaaacagataaagctgtatattaagatacttactacatatctaacgaaaaaaagaagcttactctgccttcctttccagagcagcttctaataaatgttgagcaaattgtttataaaactcatctaagtcattacttgcttcatcctgagttatatatcgaatactgtaattttctttc

SEQ ID NO: 38549 - DNA, 260 bp, Unknown
  Description of Unknown: RightRegion for integrase A1117 sequence
accgaaatactgatcattttcaagggcggttatgaatgtaatgccgttgtggaaaagtgaataataacagcctgcgttcttgcgtatcagtaagcggcgcaggctgtttccgtcttagggcaagtatacggcacttttgatttttggcatgacaaaaaacgtccgaaagcagagccgtcaaacgttcgtaaaactctcaattttgcacttcaacccgaaaaaagtatgcaaatacacagctttttcaggactgatttgac

SEQ ID NO: 38550 - DNA, 260 bp, Unknown
  Description of Unknown: RightRegion for integrase A1118 sequence
aacgaggtgcagatcatcttcaaggatgggcatgaaatgaatgtggcggtagagaagtaatgttacatatgcaggaggtcacagcctacgatttttcggaagaaattagttgtgacctcttgcaattttgtttgatatagggtataatagaatagataaagtgtatcgtgttacgatcacggaggtgatttttatgggaacatatctcaatcccggcaacagcggatttgaggaagtgctgaatggtgactacattgata

SEQ ID NO: 38551 - DNA, 260 bp, Unknown
  Description of Unknown: RightRegion for integrase A1119 sequence
gggggacgcgtggtagcggaggagcgactcgaacccccgcgaggtggtcgatgcgtgtgacgcatttgtagcgccatcaatcgcgaaaaatcacatcggagcattgcactcgacggtcggcccatccaagaagtcgaccggtcccgacctcactcgtcgctgtcggcggagtcgacgttccatcggggatcgagaacgttgtcgatttcaaaattgatcccgtcgtcctggaagcgctcgagttcgggcagttcgcggag

SEQ ID NO: 38552 - DNA, 260 bp, Unknown
  Description of Unknown: RightRegion for integrase A1120 sequence
acacatcgagaagcctgcttatatacatacaacttcctgatacccgcaaaaaccaaataatttctcaataggtttccctgatggcgcggtattacccgcgctttattttttggttgttatggtgattgtagcataattttttaaaccccgaaaggagcggttacatggtattagacataatccttcctgatccagatccccctctccagccaggggaaggaggtggcaaaaatgagtaagaggtgccaggttaggtatgt

SEQ ID NO: 38553 - DNA, 260 bp, Unknown
  Description of Unknown: RightRegion for integrase A1121 sequence
aatggaatgaaggttgaagaagaatttattaaaaagagaggagtcaacggacttcagtaaaggagagatttttatggctagggtttcagtaataccagcaaggcaagtggctgttataaatggagttcagagggaagataaaaagagggtttgtgcttactgtagagtaagtacagatacagaggagcagcttaccagctatgaagcacaagttacttattatgaaagttatattaaaggtaaaccagagtacgaatttg

SEQ ID NO: 38554 - DNA, 260 bp, Unknown
  Description of Unknown: RightRegion for integrase A1122 sequence
tttaaagcgatagtatcttacagtatagatatagaaaataatgaaagtaaaaaaaaatagccactaacatggaattatatagtaaatcttcgtattctcgcagctctaccacagccccgttgattatcatttatcatttgagcttcatctattacacatacatcataaaaagttcctgtttgaagtttttcaatagttgaagaaacatgtgttccataaggaataatatcttcctcttctcctgtaagaagtgaacatga

SEQ ID NO: 38555 - DNA, 115 bp, Unknown
  Description of Unknown: RightRegion for integrase A1123 sequence
accttcaatggagataccaaagaaatttcaattgatttatggggatctaaaaaaaaatagatgctgacatggaagattatgagaaaatatcgcaattcaatatgtcatgcacatt

SEQ ID NO: 38556 - DNA, 260 bp, Unknown
  Description of Unknown: RightRegion for integrase A1124 sequence
ttgattgaatttatctgtattcaaaatggtaaagttgattttattagttataacctatgaaagactacttagataatttatatttagaatatttgaagttggaagagcgtgcttgggaagggataagtaaacagtgttattgtgacattgctggcttctctcctgaatgcgctagttgcccttcccatactttaatgagaagaaacataattaaacttcaagacgaccaatacttattttgtacatttgtaaaccctatt

SEQ ID NO: 38557 - DNA, 260 bp, Unknown
  Description of Unknown: RightRegion for integrase A1125 sequence
cttctccaagctgaagcagttccggcgtgtcgctacccgttacgagaagactgcccgtaactatcttgccatggtcaccctcgccgccaccatcctctggctcaggtaagggtccacagaacctagtgcgccggtcatccgtcaaggtgcgagcgcgctctctgccagggcgaggcgcatctcgccgataaagcggcggcccagcggtgagagcggcttgcggttcgaccagaaggtccaggcggtggcagggatggccg

SEQ ID NO: 38558 - DNA, 260 bp, Unknown
  Description of Unknown: RightRegion for integrase A1126 sequence
ggagataccgggaacctcacaataaagttctggggagataaaaaaaaattacttctttagaggtacagtacccttcattgcactttggtacagcgagcagaagccatttgtaccaaagtgcaatcgttactcaacaagtttacatcaacttgtatgaagaattatataaacatctttgtgaggaaacagttggcaaccgtatagaaaaaagtagattaattaaaaacttatcacaatatcaattaggaaaattgataggt

SEQ ID NO: 38559 - DNA, 260 bp, Unknown
  Description of Unknown: RightRegion for integrase A1127 sequence
tatcaggaattttgtgataattgggacacgctgaacagcaaaagtacgatcaatgcttagtttaatattttgatatttttcgcatagacttgaccgaaaggcaggtctattaaaaagctgtgaatttgcgttatgaataatcaaaagagctagagcatgcggctgttaaccgcagggtcgttggttcgagtccaacagggggagtaaaatccagggctctgaaatgacgtagatacgttgtttcagagcttttgctttta

SEQ ID NO: 38560 - DNA, 260 bp, Unknown
  Description of Unknown: RightRegion for integrase A1128 sequence
ggtaaagaacgtactcaaaaagtagaaatcaattataggtttctagcagtgtctcattgatacattctctgaaggaaatgggcgaagtatgcggatttggttggatcttatgttaaagaaagaactacaaaaggtaattgattggaatttagtagataaggaagactatttatctgctatggaacgtagtccaatcaacgatttagaaattagtcatttactttctcaagcactaacagaacaaatccatgatcgtcaac

SEQ ID NO: 38561 - DNA, 260 bp, Unknown
  Description of Unknown: RightRegion for integrase A1129 sequence
agtttggtggaggtggagtttgtttataagattggaagtgtagttaaggagatattgtaatttaagaaatagaggcaaagggtactactatggtaggtgtaaaatacttactatagtatatttttgctttgtagaataatatataaatttgatgaactaaattaatgttaaaataatgtaaaaaggtgtacaattaaattgtagaattatgtttgtttatggtggtggaaaatataatgaaaataattttgagtagaaaa

SEQ ID NO: 38562 - DNA, 260 bp, Unknown
  Description of Unknown: RightRegion for integrase A1130 sequence
agcgctgataaggtcgttgtgaagttttgtggtggcgagaaggtaacagttaaggtttaatattttatcatctttgcggtcatctctttttcaaaagtggaatatgcttggtttacgatgagcaaggaagttgaagttacaggaattaagatgacagcttcagttcctgagaatattcaagtttcacttggtgctggtacaaatggtacagcaggtttaacaggcgcttcgtttgtggaagcaaacgatggttcaactcg

SEQ ID NO: 38563 - DNA, 260 bp, Unknown
  Description of Unknown: RightRegion for integrase A1131 sequence
aatgaggttagagttgaggacaaaaaagttatcatcgatcaaaaattcaaaatgatttaagggactgtccgcaaagccgggcggtttttttgaatcataaaacaaaaaaccattcatagaatggttaatttgttattgacaatcccccaaatcaaacctattatattaactaaaggaaggttgtccataatttccttctaaaaaacattttagttaatacaaaaatccgggtctaaccggcattttaaattaactatgga

SEQ ID NO: 38564 - DNA, 260 bp, Unknown
  Description of Unknown: RightRegion for integrase A1132 sequence
aataagtataaatttagcagtaagtctagtatatggagtataagaaaaaagcataattagacatataacttatttggtatggttaagtagataaaaaatagcaataatttaatggaatattggcaaataaaagaaaaacgtgttaatataaatatactaaataaaatatgtgtaaacaatttggaaggtgaatagaattgagtagatatgatgtagtaagtataatgaaggatatgacagattctttaagaaaaaatatt

SEQ ID NO: 38565 - DNA, 260 bp, Unknown
  Description of Unknown: RightRegion for integrase A1133 sequence
tcggaaaataacgtgtcattaatttttaaggatggaactgaactggaattgaatatctagagcatacaaaacccgcagaagaactagttttttcttgcgggtttttttgtggtttattcaaatctccgagatactatttaaaagaaaaagtaaattccgtttagacatacaaacggaacttactttttcttttaaggtttttttgatattaactaaggtttattaatcttgcttgaagaaaggtaaacatttaacttgcg

SEQ ID NO: 38566 - DNA, 260 bp, Unknown
  Description of Unknown: RightRegion for integrase A1134 sequence
catagaaatcaaagtatcacgtttaagtttcatagtggtgtaacaattaaaacgagttaagtcgcttattaaaaaggcggcttttttgtatttttataattaagaaaatatgttataattttagttaagagaatatcttggaggagcacatcatggataactacgaagttgcgatcaatgggactactttagctgcacggattctaggtatagaaactcctaacgtgcagtttttttataaccaagatttaacgaaaaaa

SEQ ID NO: 38567 - DNA, 260 bp, Unknown
  Description of Unknown: RightRegion for integrase A1135 sequence
cgcaccatctcccgtgtccgcgccggcatctacgggcagtcgaagcgcccccagacgtgaaaagaccccagccacaaggctgaggtcttcacacgacgtaacaaacctaggcgtacccagggttgcgtggtataatcaaaggtgccgagatgtggccagtgtcccgatgacaccggccctctcggtcgtggggcctcccggctccacgttccctctacagcagaaggagaagcacatgggagtgcatccccaagacacac

SEQ ID NO: 38568 - DNA, 260 bp, Unknown; identical to SEQ ID NO: 38567
  Description of Unknown: RightRegion for integrase A1136 sequence

SEQ ID NO: 38569 - DNA, 260 bp, Unknown
  Description of Unknown: RightRegion for integrase A1137 sequence
gacgaggatacgatccggttcgtgttccgagttggtgaggtagtgagggttcagctgtaggaggttagagggaaatttttagcccgttcgtgcatgagcgccggacgggcttttctcatgcccagaaatcgtggcagcagcgaagtgatagtgctcggggagcgtttctgcaggtcagagctaacgcgctatacactcgctaacgcaagcgattttcttggcccccttggggcatactcgctaatgcaaacgcctactta

SEQ ID NO: 38570 - DNA, 260 bp, Unknown
  Description of Unknown: RightRegion for integrase A1138 sequence
gataccctcgacctgctgtatgaaattgccgcaccggtcgccattgcggaggcagcctgatgtccgccacacgcccacagcagatcgagctcatcccgatcgcgcggattaccgtccttaatccgcgcgcccgaaacaaacggcagcaccgggagatcgtgaacaatatcgagaccattggtctcaaacgtccgatcacggtgagccgccatgatggcccgagtggcccgcgctatgatctggtctgcggagagggccgc

SEQ ID NO: 38571 - DNA, 260 bp, Unknown
  Description of Unknown: RightRegion for integrase A1139 sequence
gacaccctcgacctgctgtacgaaatcgccgcgcccatcgccattgcggaggcagcctgatgtccgccacacgcccacagcagatcgagctcatcccgatctcgcggatcactgtccttaatccgcgcgcccgaaacaaacggcagcaccgggagatcgtgaacaatatcgagaccattggcctcaaacgtccgatcacggtgagccgccatgatggccctagtggtccgcgctatgatctggtctgcggagagggccgc

SEQ ID NO: 38572 - DNA, 260 bp, Unknown
  Description of Unknown: RightRegion for integrase A1140 sequence
cagttacgaaccgatttttcaaagcgtgatgtaaaaaaacaaatcagcttgattttgtaaaacagctatcacacattggtggctgttttttcgttattgatgtatcggtatttgggttgaactgtagatgaaaattcttttgctactcggtgattaggaaggagtggtataccactccttcctaatcaccgagtttgatactcttggaaaagagcttgtatcttagggataaagggattgtcgttgtttattattatgga

SEQ ID NO: 38573 - DNA, 260 bp, Unknown
  Description of Unknown: RightRegion for integrase A1141 sequence
attataatagatcaaaatgggaaaacagaatatattttaaaaataaatttagagcaataaaaagtaactcggaaatttgagtttctttttattgctttttaatatcacaaatatggacgtgctatgggttgtcatttagaaatatgctagtttcaaagaaagtatttttctcggcaaaaaggtgaaggagttatgccaagaaaaacgtttactcggtattaagttagtaatggtatacgtaaaaaagaatctattttcaa

SEQ ID NO: 38574 - DNA, 260 bp, Unknown
  Description of Unknown: RightRegion for integrase A1142 sequence
ctcaacccccttatccggctggcagagcgagcctctgtcgggagcgcggcctggaattgaaacgtttaagcaaagacgccgcttaccgtgcgttggagaacagcggcaacagacatgcgaggagtatcgctgctggtcaactagggtccaaggcaaagctttttgcgcccgaacttttggcgacctacgacgcggaatgcaaacgcatgcgcgatttcataacaggagcagaagagtctgaacggtgcctggaccgtatg

SEQ ID NO: 38575 - DNA, 260 bp, Unknown
  Description of Unknown: RightRegion for integrase A1143 sequence
gagacgctcgactacctctatggaatggccgcccgggcgcggctgcgggtggcggcgtgagcgcagatcgccagcaggagcttcgacagatcccgatcgatcgcatcgaggtgctcaacccgcgcgagcgcaacagccgggcctttggggagatcgtcggcaacatcaagaccatcgggttgaagaagccgatcgtcgtgacaccgcggcgtgggcctaatggcgacgaacgctacctgctcgtgtgcggcgaggggcgc

SEQ ID NO: 38576 - DNA, 260 bp, Unknown
  Description of Unknown: RightRegion for integrase A1144 sequence
gacacacttgactacctttatcgcatggctgaacgcgcgcgccttcggagggtagcatgaatacatgcgcaaacccactcgtagtccgaaccgtcccgatcgagcgcatcgagataatcaatcaccgtgaccgtaacagtcggatatttgaggagatcgtcgggaacattcaggcgattgggctcaagaaaccgatagtagttacttcgcgaatagcatcggacggcactgaacgcttcatcctcgtttgtggggaggga

SEQ ID NO: 38577 - DNA, 260 bp, Unknown
  Description of Unknown: RightRegion for integrase A1145 sequence
acagtctatgaaggccacttcgtcatagccttcaaatctggcatcgaaatggaaatatgaaaaccagaagtaaatagcccatgactctacagtagagttgtgggttttcttttgcttgctgattataataatattttaataactattgtgtttatcaaccaaatggtttataatattcttagcgtaaacttggaggtgctgtatgactacggcagaaatgattaaagaactgtgtgagcaaatgaatataagtgtttccg

SEQ ID NO: 38578 - DNA, 260 bp, Unknown
  Description of Unknown: RightRegion for integrase A1146 sequence
gcttcgcttgatcctgtagttgagatggcgagacgagaaccaatgccggcaaatatatgagaactacgaaagcccggcttcgcgacttcgtcacaaacaatcggcatgccattcggctgacggtagattcgcgggcgccgatgaacccgctgcgtgtctccggtttgttgaagacctacaggcgccaagtcgacaatatgcaggaattcatcagggaagccgacgcggtgaaacaccagatggaaagcgtcgtcgatgcc

SEQ ID NO: 38579 - DNA, 260 bp, Unknown
  Description of Unknown: RightRegion for integrase A1147 sequence
cccgtttcatccttcatcagcagccttgcctacctgtgtggagacacgctgattctctgaccctaccccattcccgcaagcgggtttactgcatttcactttttaaaaccgatccgttctatcggtctacacagtagcgggactgactgtccggtaaacctacggtgttccagcaaacacgcccagtgtctgcaagctgccgcattatatcgctgcctctgcaggctaaatgcctgtctgacatccaggtttgccattat

SEQ ID NO: 38580 - DNA, 260 bp, Unknown
  Description of Unknown: RightRegion for integrase A1148 sequence
gcttcgcttgatcctgtggttgaggtggcgagacgagaaccaatgccggcaaatatatgagaactacgaaagccgggcttcgcgacttcgtcacaaacaatcggcatgccattcggctgacggtagattcgcgggcgccgatgaacccgctgcgtgtctccggtttgttgaagacctacaggcgccaagtcgacaatatgcaggaattcatcagggaagccgacgcggtgaaacaccagatggaaagcgtcgtcgatgcc

SEQ ID NO: 38581 - DNA, 260 bp, Unknown
  Description of Unknown: RightRegion for integrase A1149 sequence
gcagatctgtctcgattcattcggcttacagaacgtgtacccatcaggagggcggcatgactgacggattacccgaaatcaaatccatcccgatcgacgcaatcaatgtcctcaatccacgggttcgtaataaaaagattttcaatgagctcgtaaccagcattgcccatttgggactgaagaggccaatcacggtcagcgtacgggatgacaattctgtatacgatctggtttgtggccaagggagattggaggcattc

SEQ ID NO: 38582 - DNA, 260 bp, Unknown; identical to SEQ ID NO: 37325
  Description of Unknown: RightRegion for integrase A1150 sequence

SEQ ID NO: 38583 - DNA, 260 bp, Unknown
  Description of Unknown: RightRegion for integrase A1151 sequence
agatacaccgacgtgcctgccgttgcgactgcaatcgccgacatcgccttaaacttgtgaccgtagtcttcagttggcccttggcattcgtcctgtgctatcaagtacgccaccgttccttgaacgagcgcgacgtcagtcaacgccgatcacgcgtttgacgatgacagggttatgttagctgtattggccgctggcggcgccagttgcagatgatcgtggcgcttcgcgagttgtccggtggcgcaactgtccagcag

SEQ ID NO: 38584 - DNA, 260 bp, Unknown
  Description of Unknown: RightRegion for integrase A1152 sequence
agaaaaacaacttggaacagaagagatgaatttgtcatagaattatacaccaagatttaacttaatatactattaaaattaataacccccatcatcgttttgatcaaaagtttataaccttctctttatttagatataaatttaccttaatagtaatttagtacttcaaactcttagctcatagggaaaatattttatattcaaaaaaagaaccaacctgtataagttggttctttttcgctacttattactatacaaac

SEQ ID NO: 38585 - DNA, 60 bp, Unknown
  Description of Unknown: RightRegion for integrase A1153 sequence
gatcatgacgagtactttaactttgtacccggtactgagaagaacaccttcagattgtac

SEQ ID NO: 38586 - DNA, 260 bp, Unknown
  Description of Unknown: RightRegion for integrase A1154 sequence
actttcaggctgcccagcggacttgaatttacagaaaggttggataggaatggcaattaaaaagaccccctacggctacatttgggcagagggcaggatcgctgttgatattggtgaagccgagataatccgccgtatctttgacgaaaaggcaaacggcttatctggcagtaagatcggtgcagcactctatgatgaacagataccctatttctcggaggataagaaaaaagctatcgacaaggtgtacggcattctcc

SEQ ID NO: 38587 - DNA, 260 bp, Unknown
  Description of Unknown: RightRegion for integrase A1155 sequence
gtttctttggaggtttttcgtgaacccggaaacgcggcaaataattaccgtcccgattgacagcattacgattctcaatccgcgagctcgaagcaaggtcaagcaccaggaaatcatagacagcattgcggctgtcggattgaagcgacccattacggtcagcttgcgttcaaccgacgacgggtacagcacgtacaacctcgtgtgtgggcagggacgtattgaggcgctccggctgcttggttatttggaggcgccag

SEQ ID NO: 38588 - DNA, 260 bp, Unknown
  Description of Unknown: RightRegion for integrase A1156 sequence
attgttcatcagattactattcgcaacgcagaagttgaagaagtcattttgaaaatttaagtctgtagctaacttggctctatgaatacgcaagaaagttttaatttaaacaagctcagatgtgaagtagcaatgcaacaagcgttgcagtcatggcaaccaaaaccacaagtttctggcatggaatgtccaaaatgcaattctcatctccttgggaaacatggtcgagaaccagatggtgtacaacggtatatctgtaa

SEQ ID NO: 38589 - DNA, 260 bp, Unknown
  Description of Unknown: RightRegion for integrase A1157 sequence
cttggtataggtgaggcgtacagaacccgtgtccacaaattatacataaccaaatattaacataaaaataataaatcctcatataaatctgtaaaacatagttccattataatcaatgcaaattttcacataaataatttttttcaactttactccagtctattacattccatatatttttaacataatcagctctcaaattctgatactttaaataatatgcatgttcccaaacatcaattgttaatattggcttcatc

SEQ ID NO: 38590 - DNA, 260 bp, Unknown
  Description of Unknown: RightRegion for integrase A1158 sequence
gacccgggtcagctggtcagcgcgctggcctatacggacgatgaaacgcttgtgctttaagccgggtggcgaagacatcccatatcagagagcgtaaaagccggctctgaagagcgggcgcaccttatacatgcgcccgctttttcagaggaagtgaatatgctttttaccgtggaagggcgaaacgcccacgcgcgcctccacctgaaagacgtccatcagcagcgattcggtcagcacctcgtccggcgtgccgctgg

SEQ ID NO: 38591 - DNA, 260 bp, Unknown
  Description of Unknown: RightRegion for integrase A1159 sequence
tccgcccagcaggcgataagtactcttaaatatatggttgatggtgaggtttatttttgagtaataatcactttttcaaccgtgctatggtatgaaagtaaagtaactaatatgatattaactatcttgaacgaagcgccctgagctatagttttactataggcactgtcactggatgttggcattcttgctctagtagctcaacaatacccaatcacaaaacaattcactgataacaaactttgtgcacgtgcttggtt

SEQ ID NO: 38592 - DNA, 260 bp, Unknown
  Description of Unknown: RightRegion for integrase A1160 sequence
aaaaaaattgttgttctcgatagtcaagttactactatagaattaaaggttagtggctagtaatttgggctcttctacttctcgtctgataaattattcattgaaaaaaggcagacggcagaaagcagaagggaaatataaaatcattgggttaatattttttttcatcccttcttcctagaataataagagatgcttaaaaccttacttcttcatctcaaaaaacaataaaaatcttataaatactaaattttaaatac

SEQ ID NO: 38593 - DNA, 260 bp, Unknown
  Description of Unknown: RightRegion for integrase A1161 sequence
gtggacgaaacgctgacattccgcctgcaatgcggtcttgaatttacagaggtggtgtaattatggcagtaagaaaaacgccgtatgggtacataatagcgaacggcagaatcgcagtcgatgctgaggaagcagaggtcatcaagcgtatcttttccgatcgtatcagcggtctttcgggcgtgaagataggcgcggcgctctttgccgagcatatcgagccattcaccgaaagcgagaaaaaagcggctgacaggatt

SEQ ID NO: 38594 - DNA, 260 bp, Unknown
  Description of Unknown: RightRegion for integrase A1162 sequence
gactgcgggcgctacgaccgcctgcgcgcggtgcgggagggatgccatggaacggcatgagctgatggcgctgatggccgagctcagcttggccggcatgcgtgccgcctacgacgaggtgatgagcgacgggctgaagcggcagcgcaccgtccagcagatcctgggcgatctgctggcggcggagcgggcggagaagcaggcgcgctcgatccgttaccagctcggcgccgccaagctgcccctggccaagacgctgg

SEQ ID NO: 38595 - DNA, 260 bp, Unknown
  Description of Unknown: RightRegion for integrase A1163 sequence
ttgatgattaccaccgttgccgccacaagcgacagcttgaacattacatggaaaatctgacgggcggtaatcctcccgtcagaccgttaccccgtgtagtcccttgtaaactgtactttactaatatcaaaactttctctatccaatgaatttattttaaaactaaaaacaagttccgtaaatgaaatttctttattttcaaaatttaatgcgtaaaaaatattttgattaaattcaaattcactataagaaaagtcaaa

SEQ ID NO: 38596 - DNA, 260 bp, Unknown
  Description of Unknown: RightRegion for integrase A1164 sequence
gggcggcgagcaccgagcaaggagtggtggaaggatatcgacttgcgctggaaggactgaatattaggttaggtcgtcctaacattacataggtggaccattgttagtttcgcgcccttcctatctggctgcacattattccgaggacgctcccggccgcccggccgtgctttcctgaatcattttagaacgttggcgaactgcggccgggtggaggatgaccagcgccgggggccggtgccggcggtcggccaaccgta

SEQ ID NO: 38597 - DNA, 260 bp, Unknown
  Description of Unknown: RightRegion for integrase A1165 sequence
atttttaaacatccatttttacattatccagaggtgcatacatgtgaagacaattcgtgatgttttagaaaaaggaaaaaaaggagccttttatgcgagggtttcgtctgatcgtcaaacaatcgatgcgcaaaggcatcatgtatatgaatttataaaaaactatgaatgtgaaattgtgaaagaatatgtagatcctggagaatcggcatttaaaaagaagttaatcaagcgtccccaaatcatggcgttattacgag

SEQ ID NO: 38598 - DNA, 260 bp, Unknown
  Description of Unknown: RightRegion for integrase A1166 sequence
ttgaactttttcttcgacatggcccggcgcgtttccgtttccgaggtgacaccatggtgagcgatatcgaaacccacgccgaggttcagattatccccattgcggccatcaccgtggaaaatccgcgagaacgatctgaaaagacctttcgtgcgctggtggacagtatcggcaaggtcgggctgaagaagccgatcaccgtcgcgcaggatgacacggcgtcaggggatgcctatcggctggtctgcggtcaggggcgg

SEQ ID NO: 38599 - DNA, 260 bp, Unknown
  Description of Unknown: RightRegion for integrase A1167 sequence
gtcttcttaaatatgccacatcgacctaagtggctccccggacaggacttgaacctgtgacctaatgattaacagtcatccgctctaccgactgagctaccggggaatagatggcgaatcttaaatggattcgacctgtgggtcaagagaatatcaagatattatagatcatttttcaatgaattgttgcaacctgttcatcgcatcctctaaaactcccatgcttgttgcaaaagacaaacggatgcatccttcagtac

SEQ ID NO: 38600 - DNA, 260 bp, Unknown
  Description of Unknown: RightRegion for integrase A1168 sequence
gcagatctgtctcgattcattcggcttacagaacgtgtacccattaggagggcggcatgactgacggattacctgaaatcaaatccatcccgatcgacgcaatcaatgtcctcaatccacgggttcgtaataaaaagattttcaacgaactcgttaccagcattgcccatttaggactgaagaggccaatcacggtcagcgttcgggatgacaattctgaatacgacttggtttgtggccaagggagattagaggcgttc

SEQ ID NO: 38601 - DNA, 260 bp, Unknown
  Description of Unknown: RightRegion for integrase A1169 sequence
gatgacctcgctattctctatcagattgctgcgcccgttaacctgtcggaggctgcgtaatgtctgctcttcattcaagtcatatagaaatgatcccgatttcacgcatctcagtgctcaatccgcgcgcgcgcaacaaacgacagcatcgggatatcgtgaacaatatcgaagccgttggtctcaagcgcccgatcactgtcagccgccacaatggcccaggcgggccacggtacgatctggtttgcggggaaggccgt

SEQ ID NO: 38602 - DNA, 260 bp, Unknown
  Description of Unknown: RightRegion for integrase A1170 sequence
gacgacctcgctattctctatcagatcgctgcacccgttaacctgtcggaggccgcgtgatggctgctcttcattcaaatcatatcgaaatgatcccgatttcacgcatctcggtgcttaacccccgcgcgcgcaacaaaaggcagcatcgggatatcgtggccaatatcgaagccatcggtctcaaacgcccgatcactgtcagccgccacaatggcccaagcggaccacggtatgatctggtttgcggggagggccgc

SEQ ID NO: 38603 - DNA, 260 bp, Unknown
  Description of Unknown: RightRegion for integrase A1171 sequence
ctggtcaagcgcatcaccgtgcagacggacggcagtgtcgacatcgagtgggtggtgtagaggtacggttcgcgccgcttcagctgccgtgtactcggtctcgtaaggctgggcgagagcagattgagtttcaattgcgctgctcgtgtgaattcctgtgagttcgagggcgtggggttctcgggcgaggacctcgcggtgatgttcagccggaacccggaggcgacccgtgcggagatcgcgcgcaagaaggaagcgcg

SEQ ID NO: 38604 - DNA, 260 bp, Unknown
  Description of Unknown: RightRegion for integrase A1172 sequence
gattcgttggactacttctatggcatggcggagcgattccgcctcaggagagcggcatgacggcaagcgcacagccagaacttcggatgattcccatttctcgcattgaggtgctgaaccctcgggatcgcaaccaggaggtcttcaatgagatcgtcgagaacatacagaacatcggcttgaaaaaacccatcacggtgaccccaaggatcggggacgacggcgctgagaaatacctgctcgtttgcggcgaaggccgc

SEQ ID NO: 38605 - DNA, 260 bp, Unknown
  Description of Unknown: RightRegion for integrase A1173 sequence
gcgacgctcgaggcgctctacgaactgatgcgtcgcattcccctggcggaggtggcgtaatggcaagggaacgaaaggaagacgttccccaccatgtcgggggcgtacaggagatccggtcgatcccggtcgaccatgtccgcatcgtcaatccgcgggcaagaagcccgaagatctttgcaggcatcgtcgagagcatcgcgacggttggtctgaagcgaccaatcaccgtcacggaagcccggcgcgacgatggcggg

SEQ ID NO: 38606 - DNA, 260 bp, Unknown
  Description of Unknown: RightRegion for integrase A1174 sequence
gagccgattgccacgggggtggagcttattcaggctttgcgagtcaggctggcgcaatagcctagtcggggtcgccttggcacatcaagctcctttaaatgaaggcgatttgggcggcgccggcgaccgtccggtcctggccgaggttgtgtggaaactccgttgatggtcgcctatattgagccaacccgtctgagccaggtggctgcccatgaagcgattcatcgaaggcgaggaccgacagcaggtcactctgctgc

SEQ ID NO: 38607 - DNA, 260 bp, Unknown
  Description of Unknown: RightRegion for integrase A1175 sequence
ctgccagagaggcaaaagcccgccggaccccgccaagtctacaaagtcaaaaaacaataataacaacaagttacgcgaatttttaaattaacaaaatttatatttgtagcaaaaaaaacaaaaaaacgctgcaaacccgaagggatgcagcgtttgtcattttttagctatgcacctgctctaccagctgagctagggtggcaattagtaattgatttaacattttgtttttacaagtgattttctctgttttggtctac

SEQ ID NO: 38608 - DNA, 260 bp, Unknown
  Description of Unknown: RightRegion for integrase A1176 sequence
atctatgcgaagaaggtctccgccctgaccaaggcgctcaatcgcaaggaagagcgctaggaagcggcggagacattgcgcggcctgatcgagaagatttcgctcacaccggggccggaacgcggcgagatttacgcaacgctgcacggcgaactgggcacgatcctcaattggacggagcgtcaagccattggaaaggctacaaaaacaaacactcccggaggtgatctcacgggagtgtcgttatcagtggttgcggg

SEQ ID NO: 38609 - DNA, 260 bp, Unknown
  Description of Unknown: RightRegion for integrase A1177 sequence
cttttagcaagggttgtgattgggaagggtgaggtgactagcgttctgttgaaggtttgagggaagttttgtttaagtctatctacaattgattgaggtttttatttatgcccaagttaactttagagcgattccatgaggcggcttcaagatttgaaaaggctgaagccgaagttcaacgagcttggaaacaaggttgtcattgccctgcaccgggcgaacgggttgagtgttggacttgcccgtactacaagaattta

SEQ ID NO: 38610 - DNA, 260 bp, Unknown
  Description of Unknown: RightRegion for integrase A1178 sequence
aactgcgaaattgtttttaaacacccattcttacgtactcaagaggtgttaacatcatgaagctttctcatatattacaaccaaatatgaaggctgctttttatggccgtcattctacggataaacaagacatggatatgcaattgaattcggttatggaagtgattcgcaaatatgattgcattcatactcattcttttcttgataaggctgtttctgctcgtaaaaataaaattacaagtaggaaagaacttgaaaat

SEQ ID NO: 38611 - DNA, 260 bp, Unknown
  Description of Unknown: RightRegion for integrase A1179 sequence
ggcactcccggcgcccgcagcctcgacatcaaccgcgtacggcctcactggggggtatgagcgagcaacgacatggatgttgcgctctgctctgaggctgatcgagacatccggacatgctcgtgaccaccgtgaattcggggaaagctcctcgccgtctgccggacgtctgcaatccggtcggaactacgcggttgtcggcgcggcgcgatagcgtcctcattaccgacgataggatcacggcattaggtggtactgag

SEQ ID NO: 38612 - DNA, 260 bp, Unknown
  Description of Unknown: RightRegion for integrase A1180 sequence
tcagtacgactacccccccctcttcttttttttgaagggggtagttatctaactctttaattatctaagagttatctacggcaccgcattatgggacctaccgaccgcattatgggacctaccgaatcgcttttaccgcattatgggacctaccacaccgcattatgggacctaccgatttttcggattacctccagtgctggattttccagggagcgggttttcaaaggacaccatcccctcttttttctcgtatcgga

SEQ ID NO: 38613 - DNA, 260 bp, Unknown
  Description of Unknown: RightRegion for integrase A1181 sequence
ttctcacagctccaggagcggcaccaagcggcggtcgaagtggccgaatgcgagctctgactcctcgtcagccgtctggaagacttctcagccaaggtaaaagcagggcttgcccgccttgataggatcggcatgcggcagatcattcgcaccgtggttcgccgggtcgaaatcgacgacgcgcacgtcgagatcgtcttcagggttcccccactcgagggcccaactggcccaaaatcaccaagccaggcgaccagttc

SEQ ID NO: 38614 - DNA, 260 bp, Unknown
  Description of Unknown: RightRegion for integrase A1182 sequence
tacaccagggaggcggggaagattgacccgaaccgcgtcgacatcacgcctatcggctagcggcgctagtggccgtcgcgtaggaaccgctcggcggcgtgcaccgtcgaccgcacgctgaccgcttcttcgcggtcgcgggcgatcgcgtagtcggtgcacgccaggatgaactgttcaaggtgtctgacgatggcggcgataccgacggtgccccagccagtcagcatgacgatgagcgccagcgggagcatgacggg

SEQ ID NO: 38615 - DNA, 260 bp, Unknown
  Description of Unknown: RightRegion for integrase A1183 sequence
cgtgcgggtaagaatccaattccacctgtaatcaaagttatggatttcaaattaaaataaacacaacctaactgcatttatttaatgtagttaggttgtgtttaattgaccaaacactatataactacaataaaagagcacagcgtgtatataaagtgcgaccaacactctatataccgtccgcctaatccatctaggcaaacacttgctgtactcttacgaactattttacagtacgtaagggctccttagcaacagtt

SEQ ID NO: 38616 - DNA, 260 bp, Unknown
  Description of Unknown: RightRegion for integrase A1184 sequence
gtgatgtacagagagaaaggaaggggtaagaaaatctctcttgattacacgttgaagtaaaccgaacctgtttaaaagttaaggttgggcagctaacccaaacagacggaacgtttctcgtttcccgtaaaaaaatcgacaacttctcatgggagatgctgaaaggaagcactttcctcggccagcgaaaaggcggcatgccacaaatggtcggtgaatttgtgttgaaaaaacacggcatcgatccgcacaaagactta

SEQ ID NO: 38617 - DNA, 260 bp, Unknown
  Description of Unknown: RightRegion for integrase A1185 sequence
gtaatatacagagaaaaagggaagttcaagaagattacactggactatactttaaaatgatcccaacctgtgtaagagttaacttcgcgcatgcaaacttaacttttatacaggttagggacgatgtattatttctaacgataataatctaaacaaagtaaaacatcaaggcggatcactccgccttttcgttttttggctcacccgcgacccgaatcattccgtcgcgagtgacaagccaagtgcccgcactttttctc

SEQ ID NO: 38618 - DNA, 260 bp, Unknown
  Description of Unknown: RightRegion for integrase A1186 sequence
accgtgaagggcgtgaagcgcacgttcaagccggagtgcgtcgacatcgagtggctttgatcgccaattctggcatgactcaacagattccgagccccacgccgaacaggcactttgtcgcacactctggcacggagcagaacagtccgatacagttcttcttgtcggtaacgagccgacaccatcggataccgtgcggcacaagctgagcgggacgaacgagagtctgcgggccacgcgccccggctaagcggtggtct

SEQ ID NO: 38619 - DNA, 260 bp, Unknown
  Description of Unknown: RightRegion for integrase A1187 sequence
gtattcgacccgttgatggtagagatcctgccgcgcaatggatttgtctgccggccctagctcatcgccaccgggcccacacaaagggcacaagggcgcgcagaaaatccagatccggccccggcgttgcgtcggcgaaggcttgctcgaagtactcctcggcgaccagcagtattccttcggcgtactcgcgggtaaacgcaatgctgtcgtaagtatccatcagcgcgcgaacaccgcgaaccatctcgggtgaacgc

SEQ ID NO: 38620 - DNA, 260 bp, Unknown
  Description of Unknown: RightRegion for integrase A1188 sequence
gcacagcgccgatttcctgaaggtggacccggacaaccggttggtcgccgatgcgcttgaggccgactggaacgctcgcttgcgctcgctggccgaggcacagcaggcatacgaaaaggcgagcgtggccgacagcaatgtcgtcaccgatgccgagcgcgttgaattactggccctggcaacggacttcccccggttgtggcgtaatccgcgcacgcagatgaaagagaagaagcgcatgttgcggctgttgatcgagg

SEQ ID NO: 38621 - DNA, 260 bp, Unknown
  Description of Unknown: RightRegion for integrase A1189 sequence
gaacaactggcacaagaaataaccccggaaactttgaaaaagaaggtggtcaatggataatcaatcaacacctatgtctcatataattgaaagtagcgacggctccctctcaataaagataccgttaacacctaaagtacgcagtggccgtaagattattaccctccctggcagtacagatagcgactaccgcccctgggatagccagcccacgccacttcaattagcgctagcgagggcttatgagtgggagcaaaaac

SEQ ID NO: 38622 - DNA, 260 bp, Unknown
  Description of Unknown: RightRegion for integrase A1190 sequence
atgcgccagattgaatacttagaagggaggaagggagaatgcgtacggcacgtgcagtaagaatgatacctgcaacggcaaaacttcatgagcctgttgcaaataacgccatagggcagaaaagggtcgcggcctatgcgagggtttcaacagacaacgacgagcaactctcaagctatgaggcacaggtagattactatacaagacacatcaagtcgaatccagagtgggattttgttgaggtttatgcagacgagggc

SEQ ID NO: 38623 - DNA, 260 bp, Unknown
  Description of Unknown: RightRegion for integrase A1191 sequence
aaagaacaagcacgattaagagcactagaacagcatcatggaggtggagaaaatgcctaaagtcacagtcataccatcaacaattaatcctattacacaaatgcctatccatgcgaatcatgttaagaaagtagccgcatacgctagggtttcaacaaacagcgatgaacagtacacgagttacgaggctcaggtgaatttctataaaaaatacattcaagaaaaacctgactgggagtataccgaagtttacgctgatg

SEQ ID NO: 38624 - DNA, 260 bp, Unknown
  Description of Unknown: RightRegion for integrase A1192 sequence
agagaagcagaagcgttaagtagaaaagcagaggatagcgataaaaatgatgatagctgaactgttgctactgcaactggctctcttttgtgcataaaaattattcagaacatcatttaaaatactccagtaatttcccggcaaccctttccttcatttccttcggccagtcaggatcgaggaatgtttcatttttgataactttagatgagtccacagtttctttgattatcccgaaaatcgcatcaattagaaagcca

SEQ ID NO: 38625 - DNA, 260 bp, Unknown
  Description of Unknown: RightRegion for integrase A1193 sequence
gtgcgccgctggcgtgtcaccgacgccgggccggtatgcccggatcaccccgacagctagtcgagtccgggttcgtcggtgagcccaccgaagacccatgccgggaaccctcgcttgagcgcataacgtcgagcgacctgtgaccagtcccgtgccgtaccggcctgcaccggcgcggcgggccaccagcggggcggattcagcagatcgagccgcgacggcgcgcagcgtcgcactgggggatctccgggcggcaccgg

SEQ ID NO: 38626 - DNA, 260 bp, Unknown; identical to SEQ ID NO: 38625
  Description of Unknown: RightRegion for integrase A1194 sequence

SEQ ID NO: 38627 - DNA, 260 bp, Unknown
  Description of Unknown: RightRegion for integrase A1195 sequence
cacctcgcggatggaactatgacgccggtgggcttaaccagtgaggggaggttggcatgagtcgcacggtcactgcgatacccgcaacaaagaaacccggaactgtcacaaccccgtccggggtaccggcacgcagaaaggtcgccgcctacgcgcgagtctctaccgagatggaagaacaaacctcatcatatgaggcgcaaatcgactactacaccacctacattcgctcccgtaatgattggcagttcgcgggcatg

SEQ ID NO: 38628 - DNA, 260 bp, Unknown
  Description of Unknown: RightRegion for integrase A1196 sequence
ggccaaactgccgcgacagatttggttcatctggcgagccaagcgctgcaaacgttttgagcagcggcgtttctacaacgagacagcgactaccgttgacggagcccgtgccgtgtcttgaagagcacccggccgggtcaggcgggggcgcttccggcctgccattgcgtccagggcacactccagtcaccgttgttctgcaacgacagtggcgggcccccggtgttgcggacctcgacgatgtcgccgggttgggaaaa

SEQ ID NO: 38629 - DNA, 260 bp, Unknown; identical to SEQ ID NO: 38628
  Description of Unknown: RightRegion for integrase A1197 sequence

SEQ ID NO: 38630 - DNA, 260 bp, Unknown
  Description of Unknown: RightRegion for integrase A1198 sequence
atcgcccagggtctcggcgtgggcagggcaacgctctaccgggctctatctgttgattagaacaagtaaacgcgagagtcgctgtacaccggagaaatatcgtttccccatccagtcacaatgttctttgacagcgctggttgtttagaagctgatccgcagaatttaaaatcaaaagaatatgccatgcccacagtgtcggaacatcacgtggcggtcagggtacacacgatcggcaggtgacgtaataaggctatttt

SEQ ID NO: 38631 - DNA, 260 bp, Unknown; identical to SEQ ID NO: 38630
  Description of Unknown: RightRegion for integrase A1199 sequence

SEQ ID NO: 38632 - DNA, 260 bp, Unknown; identical to SEQ ID NO: 37763
  Description of Unknown: RightRegion for integrase A1200 sequence

SEQ ID NO: 38633 - DNA, 260 bp, Unknown
  Description of Unknown: RightRegion for integrase A1201 sequence
cagacgaaagaacgggtatccgatatgaacttatcggggactattactacccctgcttaaccgcagaagaaaaacctttgctttcaaggtacggaagaatgcgagagcgatatttgaaagaacacaagcgagttttatattacactctgatgacaagtggaaagttatatgaacaccttgccgagattgacacttcggcttgtgatatggctgaatatctcataaaggaaatggcaagaaagcaaggcgttaccgagcaa

SEQ ID NO: 38634 - DNA, 72 bp, Unknown
  Description of Unknown: RightRegion for integrase A1202 sequence
ggtaaagaacgtactcaaaaagtagaaatcaattataggtttctagcagtgtctcattgatacattctctga

SEQ ID NO: 38635 - DNA, 260 bp, Unknown; identical to SEQ ID NO: 37479
  Description of Unknown: RightRegion for integrase A1203 sequence

SEQ ID NO: 38636 - DNA, 161 bp, Unknown; identical to SEQ ID NO: 25649
  Description of Unknown: RightRegion for integrase A1204 sequence

SEQ ID NO: 38637 - DNA, 260 bp, Unknown; identical to SEQ ID NO: 37479
  Description of Unknown: RightRegion for integrase A1205 sequence

SEQ ID NO: 38638 - DNA, 260 bp, Unknown; identical to SEQ ID NO: 38633
  Description of Unknown: RightRegion for integrase A1206 sequence

SEQ ID NO: 38639 - DNA, 260 bp, Unknown; identical to SEQ ID NO: 24864
  Description of Unknown: RightRegion for integrase A1207 sequence

SEQ ID NO: 38640 - DNA, 260 bp, Unknown; identical to SEQ ID NO: 25656
  Description of Unknown: RightRegion for integrase A1208 sequence

SEQ ID NO: 38641 - DNA, 260 bp, Unknown; identical to SEQ ID NO: 37543
  Description of Unknown: RightRegion for integrase A1209 sequence

SEQ ID NO: 38642 - DNA, 260 bp, Unknown
  Description of Unknown: RightRegion for integrase A1210 sequence
tttatcgtgaaagaagttaccattgtggattctgacaccatatatattgaaacgtattaaagaggggtgtatgcaccccccttttgtaattacaatctcattttcaatacacctcgctgcatacgtcgccacctttgtcccttttccagcggaatagctttcaattcctttaataagcccgatcgttccgatggagattaagtcctctgcatcctcacctgtattttcgaactttttcacaatatgggcgaccaagcgaa

SEQ ID NO: 38643 - DNA, 260 bp, Unknown; identical to SEQ ID NO: 37455
  Description of Unknown: RightRegion for integrase A1211 sequence

SEQ ID NO: 38644 - DNA, 260 bp, Unknown; identical to SEQ ID NO: 25639
  Description of Unknown: RightRegion for integrase A1212 sequence

SEQ ID NO: 38645 - DNA, 260 bp, Unknown
  Description of Unknown: RightRegion for integrase A1213 sequence
tatgcgggtgaaaagacgagacgagttgagggatcggcctacgaatacgaaagcgattgacattccgaacgaatgaaacaatatccgactcagcgatttggaaaggaattctccatggctaagactaccggactgccgacccttgaagacctcgttgacgttccgcgcggtgatttgctcaaactgagggcgaatgtcgaagaagctcttagggccaatgaagctcgcgaaaagcaagctgctaaggacaagatcaagga

SEQ ID NO: 38646 - DNA, 260 bp, Unknown; identical to SEQ ID NO: 37479
  Description of Unknown: RightRegion for integrase A1214 sequence

SEQ ID NO: 38647 - DNA, 260 bp, Unknown; identical to SEQ ID NO: 24488
  Description of Unknown: RightRegion for integrase A1215 sequence

SEQ ID NO: 38648 - DNA, 260 bp, Unknown; identical to SEQ ID NO: 37649
  Description of Unknown: RightRegion for integrase A1216 sequence

SEQ ID NO: 38649 - DNA, 260 bp, Unknown; identical to SEQ ID NO: 25636
  Description of Unknown: RightRegion for integrase A1217 sequence

SEQ ID NO: 38650 - DNA, 260 bp, Unknown
  Description of Unknown: RightRegion for integrase A1218 sequence
ctgtcgtacgtcggcgagcccggcttcaagccggtcggcggcaaccgggccaagcagtagctacgccagcgccatggggagcgtcggcgccgcgagcagcgggtcgggggccggcgcgggagggaacgggcggcgcttgaaccagatctgaatccagagcccgtcgccgccgagacgtagcaacaggtcgttcatggcgtcccgcagctggctggtgcagtagcggtcgctgaccaggtgtatgcaccagccgtcgtcct

SEQ ID NO: 38651 - DNA, 260 bp, Unknown; identical to SEQ ID NO: 24488
  Description of Unknown: RightRegion for integrase A1219 sequence

SEQ ID NO: 38652 - DNA, 260 bp, Unknown; identical to SEQ ID NO: 24868
  Description of Unknown: RightRegion for integrase A1220 sequence

SEQ ID NO: 38653 - DNA, 260 bp, Unknown
  Description of Unknown: RightRegion for integrase A1221 sequence
aaatcactaattaataaaatttatatcgacggtgaacaagttactattgaatggctctagtagcttgtttatttagattgtttagtatctcgttatctctcgttggacgtaaagagggaacaaagcatctaataggtgtcactcataagccgcctattattattgaccctgttacttctacctatgtattccctactgtcgcgccaagttcaacagattgtatttggatttttccacagcatattaaggattatcatgca

SEQ ID NO: 38654 - DNA, 260 bp, Unknown
  Description of Unknown: RightRegion for integrase A1222 sequence
aaatcactaattaataaaatttatattgacggtgaacaagttactattgaatggctctagtagcttgtttatttagattgtttagttcctcgttttctctcgttggacggaaacgaatcgagaaactaaaattataaataaaaagtaacctgtttttctatagattgctttttatcgcatgcctctcgcctgtcccctcagttcagtaatttcctgcatttgcctgtttccagtcggtagatattccacaaaacagcagg

SEQ ID NO: 38655 - DNA, 260 bp, Unknown; identical to SEQ ID NO: 24864
  Description of Unknown: RightRegion for integrase A1223 sequence

SEQ ID NO: 38656 - DNA, 89 bp, Unknown; identical to SEQ ID NO: 24761
  Description of Unknown: RightRegion for integrase A1224 sequence

SEQ ID NO: 38657 - DNA, 260 bp, Unknown; identical to SEQ ID NO: 25639
  Description of Unknown: RightRegion for integrase A1225 sequence

SEQ ID NO: 38658 - DNA, 260 bp, Unknown; identical to SEQ ID NO: 37846
  Description of Unknown: RightRegion for integrase A1226 sequence

SEQ ID NO: 38659 - DNA, 260 bp, Unknown; identical to SEQ ID NO: 38653
  Description of Unknown: RightRegion for integrase A1227 sequence

SEQ ID NO: 38660 - DNA, 260 bp, Unknown
  Description of Unknown: RightRegion for integrase A1228 sequence
aaaggaattaaagggaagcgccagaactcattgaagattacgggtatagagttttattaattggaagttcggaataactatgcagttacctcgttcgccaattatttttcgcaatataaaaagtcccacttaaaacaatcattttaagcgggactttttatattgagtaactaaaattatttagctgctacttcttcgccattgtaagaaccacagtttttacatacacggtgtgataatttgtattcgccacagtttgg

SEQ ID NO: 38661 - DNA, 260 bp, Unknown; identical to SEQ ID NO: 37479
  Description of Unknown: RightRegion for integrase A1229 sequence

SEQ ID NO: 38662 - DNA, 260 bp, Unknown; identical to SEQ ID NO: 25647
  Description of Unknown: RightRegion for integrase A1230 sequence

SEQ ID NO: 38663 - DNA, 260 bp, Unknown; identical to SEQ ID NO: 24864
  Description of Unknown: RightRegion for integrase A1231 sequence

SEQ ID NO: 38664 - DNA, 260 bp, Unknown; identical to SEQ ID NO: 37479
  Description of Unknown: RightRegion for integrase A1232 sequence

SEQ ID NO: 38665 - DNA, 260 bp, Unknown; identical to SEQ ID NO: 37455
  Description of Unknown: RightRegion for integrase A1233 sequence

SEQ ID NO: 38666 - DNA, 260 bp, Unknown; identical to SEQ ID NO: 38633
  Description of Unknown: RightRegion for integrase A1234 sequence

SEQ ID NO: 38667 - DNA, 260 bp, Unknown; identical to SEQ ID NO: 37846
  Description of Unknown: RightRegion for integrase A1235 sequence

SEQ ID NO: 38668 - DNA, 260 bp, Unknown; identical to SEQ ID NO: 37846
  Description of Unknown: RightRegion for integrase A1236 sequence

SEQ ID NO: 38669 - DNA, 89 bp, Unknown; identical to SEQ ID NO: 24761
  Description of Unknown: RightRegion for integrase A1237 sequence

SEQ ID NO: 38670 - DNA, 260 bp, Unknown; identical to SEQ ID NO: 25656
  Description of Unknown: RightRegion for integrase A1238 sequence

SEQ ID NO: 38671 - DNA, 260 bp, Unknown
  Description of Unknown: RightRegion for integrase A1239 sequence
actggtaacactagccggaaaaggaattcgcttaaaattactagtatcgaattttattaataaactatggaagtatgtacagtcttgcaaccacggttgtatcccgtctaaagtactcgtacatgatgggattgatggtacagactttggtactgccttttcaagaaaaaaagacgtagtcagcgcactaaataagaaaaactatgataacttagcaaatgatacaaacattgaagtattcaattacaaagcgcaattca

SEQ ID NO: 38672 - DNA, 260 bp, Unknown; identical to SEQ ID NO: 25647
  Description of Unknown: RightRegion for integrase A1240 sequence

SEQ ID NO: 38673 - DNA, 152 bp, Unknown
  Description of Unknown: RightRegion for integrase A1241 sequence
cacgttaaaagagggaaaactaagcattctatcaaaataaaaaacattgatttttattaacttcttttgtgcggaactacgaacagttcattaatacgaagtgtacaaacttccatacaaaaataaccacgtcaattaagacgtggtttcta

SEQ ID NO: 38674 - DNA, 152 bp, Unknown; identical to SEQ ID NO: 38673
  Description of Unknown: RightRegion for integrase A1242 sequence

SEQ ID NO: 38675 - DNA, 260 bp, Unknown
  Description of Unknown: RightRegion for integrase A1243 sequence
aaataacccctatcctaaggtttaatttcatttttgacctcacagccactaataatttccactaagaaaagtagtaagtatcttaaaaaacagataaagctgtatctcctgtgaacacaatgggtgccaccaagctgttatctgaaaagctgtttcatcaagcaaaccgccacgtccaaaacaaaggaaccttgttttgttcggtccgctttggaaatgttctcggttccagaggttcggtcatccccatattatttgaa

SEQ ID NO: 38676 - DNA, 72 bp, Unknown; identical to SEQ ID NO: 38634
  Description of Unknown: RightRegion for integrase A1244 sequence

SEQ ID NO: 38677 - DNA, 260 bp, Unknown
  Description of Unknown: RightRegion for integrase A1245 sequence
cgagggcggccgttcgatggagacgagcgggtcaagatcaaatgggcggcgaggacgtagcggagtgaacacctcggaacgttcctaggtggctcgtgtgagctaggccacaacagaacacgatcagcggtcacggtgcctcacgcattgtggccgcttttcgtttgggggcgtttcacgccgacacagcggagagggtgaacaacactaccgacacccctctgacctgctcttatgttgtggagtgttgattctgatat

SEQ ID NO: 38678 - protein, 9 aa, Unknown
  Description of Unknown: LAGLIDADG family peptide sequence
LAGLIDADG

SEQ ID NO: 38679 - DNA, 181 bp, Unknown
  Description of Unknown: Long terminal repeat sequence
gggtctctctggttagaccagatctgagcctgggagctctctggctaactagggaacccactgcttaagcctcaataaagcttgccttgagtgcttcaagtagtgtgtgcccgtctgttgtgtgactctggtaactagagatccctcagacccttttagtcagtgtggaaaatctctagca

SEQ ID NO: 38680 - DNA, 234 bp, Unknown
  Description of Unknown: Long terminal repeat sequence
tggaagggctaattcactcccaacgaagacaagatctgctttttgcttgtactgggtctctctggttagaccagatctgagcctgggagctctctggctaactagggaacccactgcttaagcctcaataaagcttgccttgagtgcttcaagtagtgtgtgcccgtctgttgtgtgactctggtaactagagatccctcagacccttttagtcagtgtggaaaatctctagca

SEQ ID NO: 38681 - protein, 8 aa, Artificial Sequence
  Description of Artificial Sequence: Synthetic peptide
SQNYPIVQ

SEQ ID NO: 38682 - DNA, 47 bp, Streptomyces virus TG1
gatcagctccgcgggcaagacctttctccttcacggggtggaaggtc

SEQ ID NO: 38683 - DNA, 45 bp, Streptomyces virus phiC31
tgcgggtgccagggcgtgcccttgggctccccgggcgcgtactcc

SEQ ID NO: 38684 - DNA, 34 bp, Streptomyces virus phiBT1
caggtttttgacgaaagtgatccagatgatccag

SEQ ID NO: 38685 - DNA, 53 bp, Unknown
  Description of Unknown: Streptomyces phage SV1 sequence
catcagggcggtcaggccgtagatgtggaagaaacggcagcacggcgaggacg

SEQ ID NO: 38686 - DNA, 50 bp, Unknown
  Description of Unknown: Streptomyces phage Joe sequence
atctggatgtgggtgtccatctgcgggcagacgccgcagtcgaagcacgg

SEQ ID NO: 38687 - DNA, 42 bp, Unknown
  Description of Unknown: Mycobacterium phage Bxz2 sequence
cggtctccatcgggatctgctgatcgagcagcatgccgacca

SEQ ID NO: 38688 - DNA, 42 bp, Unknown; identical to SEQ ID NO: 38687
  Description of Unknown: Mycobacterium phage Peaches sequence

SEQ ID NO: 38689 - DNA, 38 bp, Unknown
  Description of Unknown: Mycobacterium phage Bxb1 sequence
ggcttgtcgacgacggcggtctccgtcgtcaggatcat

SEQ ID NO: 38690 - DNA, 53 bp, Unknown
  Description of Unknown: Lactococcus phage TP901-1 sequence
atgccaacacaattaacatctcaatcaaggtaaatgctttttgctttttttgc

SEQ ID NO: 38691 - DNA, 64 bp, Unknown
  Description of Unknown: Streptomyces phage R4 sequence
gcatgttccccaaagcgataccacttgaagcagtggtactgcttgtgggtacactctgcgggtg

SEQ ID NO: 38692 - DNA, 42 bp, Unknown
  Description of Unknown: Enterococcus phage EFC-1 sequence
caaaggatcactgaatcaaaagtattgctcatccacgcgaaa

SEQ ID NO: 38693 - DNA, 62 bp, Unknown
  Description of Unknown: Streptococcus phage phi-m46.1 sequence
gtagatttgtttccccagacgcacacgtggagtgtgtaagtttacttgagaaacggagttaa

SEQ ID NO: 38694 - DNA, 40 bp, Unknown
  Description of Unknown: Listeria phage A118 sequence
tttcggatcaagctatgaaggacgcaaagagggaactaaa

SEQ ID NO: 38695 - DNA, 62 bp, Unknown
  Description of Unknown: Lactobacillus phage LR1 sequence
aagtgtccaagctggcccccgatcccagtttcaatagtttggggaatctttgtaagtggtaa

SEQ ID NO: 38696 - DNA, 58 bp, Bacillus subtilis
cacccattgtgttcacaggagatacagctttatctgtactgatattaatgacatgctg

SEQ ID NO: 38697 - DNA, 71 bp, Unknown
  Description of Unknown: Bacillus phage WBeta sequence
cggaaggtagcgtcaacgataggtgtaactgtcgtgtttgtaacggtacttccaacagctggcgccgccac

SEQ ID NO: 38698 - DNA, 62 bp, Streptococcus suis
cttccagcacatcacccacatggtctgtgtcggtgtgcgtcagcactagactatcaatccta

SEQ ID NO: 38699 - DNA, 61 bp, Bacillus amyloliquefaciens
ttttttccgcctgtcgtaaccggatctgttgtaacgattatcggaatgaccttgatgccgg

SEQ ID NO: 38700 - DNA, 61 bp, Staphylococcus epidermidis
acttccaattaacccttcaccagccctataccaagttcctgtcgcgcatcctccagctaat

SEQ ID NO: 38701 - DNA, 62 bp, Clostridium botulinum
actacttaatatatccataagagaaatttcatttccttctttgtctacccctataggatctt

SEQ ID NO: 38702 - DNA, 62 bp, Clostridium botulinum
acgaaataaaagattgtatagatgctggtaggaaacatgcccttgtcatttagctgaaacag

SEQ ID NO: 38703 - DNA, 61 bp, Clostridioides difficile
tattctaagtaatgtagttttaccacatccactaggtccgagtaaacatagaaattcccct

SEQ ID NO: 38704 - DNA, 65 bp, Clostridium botulinum
atggattttgcagattcccagatgcccctacagaaagaggtacaaaacatttattggaattaatt

SEQ ID NO: 38705 - DNA, 66 bp, Staphylococcus lugdunensis
gttcgtggtaactatgggtggtacaggtgccacattagttgtaccatttatgtttatgtggttaac

SEQ ID NO: 38706 - DNA, 61 bp, Geobacillus thermoglucosidasius
caagaaacgttccgtctgtttgtgtcagctgcgcgaaattaatgaccggatcgtttgttcc

SEQ ID NO: 38707 - DNA, 62 bp, Rhodobacter sphaeroides
ggaactccgccgggcccatctggtcgaagaagatgaaggggcccaccatctgcctccgggcc

SEQ ID NO: 38708 - DNA, 62 bp, Burkholderia multivorans
gatacggatgttcgtcgccggcacgctggtcacgctcggcaatcccaagatcatgctgttct

SEQ ID NO: 38709 - DNA, 40 bp, Unknown
  Description of Unknown: Mycobacterium tuberculosis sequence
gaaggtgttggtgcggggttggccgtggtcgaggtggggt

SEQ ID NO: 38710 - DNA, 59 bp, Streptomyces scabiei
ggacggcgcagaaggggagtagctcttcgccggaccgtcgacatactgctcagctcgtc

SEQ ID NO: 38711 - DNA, 64 bp, Bacillus cytotoxicus
gcatacattgttgttgtttttccagatccagttggtcctgtaaatataagcaatccatgtgagt

SEQ ID NO: 38712 - DNA, 52 bp, Unknown
  Description of Unknown: Bacteriophage A118  sequence
taactttttcggatcgagttatgatggacgtaaagagggaacaaagcatcta

SEQ ID NO: 38713 - DNA, 40 bp, Unknown; identical to SEQ ID NO: 38694
  Description of Unknown: Shuttle integration vector pPL1 sequence

SEQ ID NO: 38714 - DNA, 32 bp, Unknown
  Description of Unknown: Brochothrix phage BL3 sequence
tttccacagacaactcacgtggaggtagtcac

SEQ ID NO: 38715 - DNA, 62 bp, Enterococcus faecalis
ttctggaccatgatgcgccacttccgaaatttcaaaaagatcagtggtcaaacggctcatta

SEQ ID NO: 38716 - DNA, 62 bp, Listeria monocytogenes
ctgtaactttttcggatcaagctatgagggacgcaaagagggaactaaacacttaattggtg

SEQ ID NO: 38717 - DNA, 61 bp, Clostridium botulinum
tattcaattatgtgtcgtaatttttatctattgcgacgaaaaaacaccataaaattctaac

SEQ ID NO: 38718 - DNA, 61 bp, Clostridium botulinum
agaaatagacctttcaactggacaaggtgctgataaaactatgcagcaagtcttaagtaaa

SEQ ID NO: 38719 - DNA, 65 bp, Staphylococcus aureus
tttatattgcgaaaaataattggcgaacgaggtaactggatacctcatccgccaattaaaatttg

SEQ ID NO: 38720 - DNA, 62 bp, Listeria innocua
ttattgcaagaaaaatgggttataagtacacatcaggttatagtaatatcgaaaaaggaagc

SEQ ID NO: 38721 - DNA, 62 bp, Rhodococcus jostii
atcgcgcagaacggtgcggtgatcagtgagtacgcaccgggcacgacaccggcgaagcatcg

SEQ ID NO: 38722 - DNA, 62 bp, Bacillus cereus AH187
gtaatatgtttggatatggggaagtgaatcagtacaaccgccacagtaccctcatgtcagcc

SEQ ID NO: 38723 - DNA, 62 bp, Bacillus mycoides
tttgtagccattaggcgcattaggttgacgccattaagccctaaagcatcattcgtcgaaac

SEQ ID NO: 38724 - DNA, 62 bp, Unknown
  Description of Unknown: Streptococcus phage 370.1 sequence
gtttgtaaaggagactgataatggcatgtacaactatactcgtcggtaaaaaggcatcttat

SEQ ID NO: 38725 - DNA, 62 bp, Lactococcus lactis
aatactaataatagctagtacaattaacatctctatcaaagtaaaagcttttagctctttct

SEQ ID NO: 38726 - DNA, 62 bp, Streptococcus pneumoniae
tctggtgtagacgttaaacgtccaatcaagataactttattatacatattttcttcctccta

SEQ ID NO: 38727 - DNA, 63 bp, Streptococcus mitis
taggaggaaaaaatatgtataataaagttatcatgattgggcgtttgacgtctacaccagaat

SEQ ID NO: 38728 - DNA, 66 bp, Streptococcus equi
ttccaaagagcgcccaacgcgacctgaaatttgaataagactgctgcttgtgtaaaggcgatgatt

SEQ ID NO: 38729 - DNA, 65 bp, Staphylococcus haemolyticu
caatcatcagataactatggcggcacgtgcattaaccacggttgtatcccgtctaaagtactcgt

SEQ ID NO: 38730 - DNA, 64 bp, Staphylococcus lugdunensis
aatctgcaaacatgtatggcggtacatgtatcaacattggttgtattcctacaaagacactcat

SEQ ID NO: 38731 - DNA, 56 bp, Staphylococcus virus phiMR11
cgaaaatgtatggaggcacttgtatcaatataggatgtataccttcgaagacactt

SEQ ID NO: 38732 - DNA, 62 bp, Geobacillus sp.
agacgagaaacgttccgtccgtctgggtcagttgggcaaagttgatgaccgggtcgtccgtt

SEQ ID NO: 38733 - DNA, 62 bp, Streptococcus pneumoniae
agcacgctgataatcagcaagaccaccaacatttccaccaatgtaaaagctttaaccttagc

SEQ ID NO: 38734 - DNA, 61 bp, Unknown
  Description of Unknown: Streptomyces phage phiK38-1 sequence
gagcgccggatcagggagtggacggcctgggagcgctacacgctgtggctgcggtcggtgc

SEQ ID NO: 38735 - DNA, 46 bp, Streptomyces virus TG1
tccagcccaacagtgttagtctttgctcttacccagttgggcggga

SEQ ID NO: 38736 - DNA, 42 bp, Streptomyces virus phiC31
gtgccccaactggggtaacctttgagttctctcagttggggg

SEQ ID NO: 38737 - DNA, 52 bp, Streptomyces virus phiBT1
ggtgctgggttgttgtctctggacagtgatccatgggaaactactcagcacc

SEQ ID NO: 38738 - DNA, 52 bp, Unknown
  Description of Unknown: Streptomyces phage SV1 sequence
atgtggtcctttagatccactgacgtgggtcagtgtctctaaaggactcgcg

SEQ ID NO: 38739 - DNA, 47 bp, Unknown
  Description of Unknown: Streptomyces phage Joe sequence
agttgtggccatgtgtccatctgggggcagatggagacggggtcaca

SEQ ID NO: 38740 - DNA, 52 bp, Unknown
  Description of Unknown: Mycobacterium phage Bxz2 sequence
taaccgcaagtgtacatccctcggctggccgagacaagtacagttgcgacag

SEQ ID NO: 38741 - DNA, 52 bp, Unknown
  Description of Unknown: Mycobacterium phage Peaches sequence
tagtttccaatgttacaggaactgctggcagaatccaacacattggaagtcg

SEQ ID NO: 38742 - DNA, 48 bp, Unknown
  Description of Unknown: Mycobacterium phage Bxb1 sequence
ggtttgtctggtcaaccaccgcggtctcagtggtgtacggtacaaacc

SEQ ID NO: 38743 - DNA, 53 bp, Unknown
  Description of Unknown: Lactococcus phage TP901-1 sequence
gagtttttatttcgtttatttcaattaaggtaactaaaaaactccttttaagg

SEQ ID NO: 38744 - DNA, 50 bp, Unknown
  Description of Unknown: Streptomyces phage R4 sequence
tgttccccaaagcgataccacttgaagcagtggtactgcttgtgggtaca

SEQ ID NO: 38745 - DNA, 54 bp, Unknown
  Description of Unknown: Enterococcus phage EFC-1 sequence
attttaggtatatgattttgtttattagtgtaaataacactatgtacctaaaat

SEQ ID NO: 38746 - DNA, 62 bp, Unknown
  Description of Unknown: Streptococcus phage phi-m46.1 sequence
tattagtatagaagaaagctctcagcacacgtggagtgtgttgctctctgctcgtaaagcct

SEQ ID NO: 38747 - DNA, 40 bp, Unknown
  Description of Unknown: Listeria phage A118 sequence
ttcctcgttttctctcgttggaagaagaagaaacgagaaa

SEQ ID NO: 38748 - DNA, 62 bp, Unknown
  Description of Unknown: Lactobacillus phage LR1 sequence
tataatttcgtatattagatataaccggtttcaattggaaatacctaatatacgaaaaaagg

SEQ ID NO: 38749 - DNA, 56 bp, Bacillus subtilis
tgtagtaagtatcttaatatacagctttatctgttttttaagatacttactacttt

SEQ ID NO: 38750 - DNA, 63 bp, Unknown
  Description of Unknown: Bacillus phage WBeta sequence
ctagttttaaagttggttattagttactgtgatatttatcacggtacccaataaccaatgaat

SEQ ID NO: 38751 - DNA, 62 bp, Streptococcus suis
ggtattgtatcaatttcagaactcacacttcggtatgcgtactcaatttgatacaattacaa

SEQ ID NO: 38752 - DNA, 62 bp, Bacillus amyloliquefaciens
cttttttgttgtacttaaacaataatgcttgtaagaattattgattgagtacgacataaacc

SEQ ID NO: 38753 - DNA, 61 bp, Staphylococcus epidermidis
ttatatttcgacttaattaagtacagttccacctagagatagactaaataaagtattatta

SEQ ID NO: 38754 - DNA, 62 bp, Clostridium botulinum
gttaggtgtatatcatacctaacgcaattcattacatcacatatgttatacacctactttaa

SEQ ID NO: 38755 - DNA, 62 bp, Clostridium botulinum
aaaagaatccaaattatcgtactttaacatagtgaatactgtccatcatgtataaaagtacg

SEQ ID NO: 38756 - DNA, 64 bp, Clostridioides difficile
tatataattatttggactaacatatagtatccacttggctattattagttagtccaaataaata

SEQ ID NO: 38757 - DNA, 65 bp, Clostridium botulinum
gtttatatgtttactaataagacgctctcaacccataaagtcttattagtaaacatatttcaact

SEQ ID NO: 38758 - DNA, 65 bp, Staphylococcus lugdunensis
tttttgtatgttagttgtgtcactgggtagacctaaatagtgacacaactgctattaaaatttaa

SEQ ID NO: 38759 - DNA, 62 bp, Geobacillus thermoglucosidasius
ttataaacctgttttaaagttaactttacatgcctaacattaactcttatacaggttaaggt

SEQ ID NO: 38760 - DNA, 62 bp, Rhodobacter sphaeroides
atggggtcacaataccaatcatgttcaagaatgtgaagggtattttacccttgtcgtttcag

SEQ ID NO: 38761 - DNA, 62 bp, Burkholderia multivorans
agttgtctgataatatattttcggacacgctcggcaacccgaacgagagtcaaaatacattt

SEQ ID NO: 38762 - DNA, 52 bp, Unknown
  Description of Unknown: Mycobacterium tuberculosis sequence
gtagtgtatctcacaggtccacggttggccgtggactgctgaagaacattcc

SEQ ID NO: 38763 - DNA, 63 bp, Streptomyces scabiei
gctcatgtatgtgtctacgcgagattctcgcccgagaacttctgcaaggcactgctcttggct

SEQ ID NO: 38764 - DNA, 64 bp, Bacillus cytotoxicus
caataacggttgtatttgtagaacttgaccagttgttttagtaacataaatacaactccgaata

SEQ ID NO: 38765 - DNA, 52 bp, Unknown
  Description of Unknown: Bacteriophage A118  sequence
gtttagtatctcgttatctctcgttggagggagaagaaacgggataccaaaa

SEQ ID NO: 38766 - DNA, 40 bp, Unknown
  Description of Unknown: Shuttle integration vector pPL1 sequence
ttcctcgttttctctcgttggacggaaacgaatcgagaaa

SEQ ID NO: 38767 - DNA, 33 bp, Unknown
  Description of Unknown: Brochothrix phage BL3 sequence
caatgaaaaactaggcatgtagaagttgtttgt

SEQ ID NO: 38768 - DNA, 62 bp, Enterococcus faecalis
gtatcttgatgtacaacattactctttattttcaaatacagaataatgttgcatataatatt

SEQ ID NO: 38769 - DNA, 62 bp, Listeria monocytogenes
ttgtttagtccctcgttttctctcgttggacggagacgaatcgagaaactaaaattataaat

SEQ ID NO: 38770 - DNA, 62 bp, Clostridium botulinum
tatatacttatagatactaaatatttttgtattgcgtaacttcttctacacctgtaatatct

SEQ ID NO: 38771 - DNA, 62 bp, Clostridium botulinum
aaatataacctgtgtattgaaacaaggtgctgataaaaccctttcataaacacaagtaaata

SEQ ID NO: 38772 - DNA, 62 bp, Staphylococcus aureus
gtggttgtttttgttggaagtgtgtatcaggtatctgcatagttattccgaacttccaatta

SEQ ID NO: 38773 - DNA, 62 bp, Listeria innocua
ttatataaaatagtgtttttgtaaagtacacatcaccatatttgacaaaaaacctataaata

SEQ ID NO: 38774 - DNA, 59 bp, Rhodococcus jostii
ctatgtggtggtaatagcgagtaggggactactcgctccaggtacattaacaccatgga

SEQ ID NO: 38775 - DNA, 62 bp, Bacillus cereus AH187
ataatagtgtatatggtagagaattaaaccagtttaatactccaccatgtacacgcagtgag

SEQ ID NO: 38776 - DNA, 62 bp, Bacillus mycoides
cgtcaccttgttggcgtaattagatttactccaacagggtgatgacaaagctaatgaatttt

SEQ ID NO: 38777 - DNA, 65 bp, Unknown
  Description of Unknown: Streptococcus phage 370.1 sequence
atggataaaaaaatacagcgtttttcatgtacaactatactagttgtagtgcctaaataatgctt

SEQ ID NO: 38778 - DNA, 60 bp, Lactococcus lactis
cgcttaattgcgagtttttatttcgcttatctcaattaaggtaactaaaaaactcctttt

SEQ ID NO: 38779 - DNA, 62 bp, Streptococcus pneumoniae
tatttctgtattttagtcaaagtaattaagataagttagagttagtaacagtattttaactt

SEQ ID NO: 38780 - DNA, 61 bp, Streptococcus mitis
gttaataatatgtatttaagtctaacttatcatgacaaatttgactaaaatacaaaaaggc

SEQ ID NO: 38781 - DNA, 62 bp, Streptococcus equi
aaaaattacaaagttttcaacccttgatttgaattagcggtcaaataatttgtaattcgttt

SEQ ID NO: 38782 - DNA, 64 bp, Staphylococcus haemolyticu
ttaataaactatggaagtatgtacagtcttgcaatgttgagtgaacaaacttccataataaaat

SEQ ID NO: 38783 - DNA, 61 bp, Staphylococcus lugdunensis
atttttgtacggaagtagatactatctttcaatatccatgttacttagtgccatacaaaaa

SEQ ID NO: 38784 - DNA, 55 bp, Staphylococcus virus phiMR11
tttgtgcggaactacgaacagttcattaatacgaagtgtacaaacttccatacaa

SEQ ID NO: 38785 - DNA, 66 bp, Geobacillus sp.
gtgttataaacctgtgtgagagttaagtttacatgcctaaccttaacttttacgcaggttcagctt

SEQ ID NO: 38786 - DNA, 62 bp, Streptococcus pneumoniae
ggaaaatataaataattttagtaacctacatctcaatcaaggatagtaaaactctcactctt

SEQ ID NO: 38787 - DNA, 60 bp, Unknown
  Description of Unknown: Streptomyces phage phiK38-1 sequence
ccctaatacgcaagtcgataactctcctgggagcgttgacaacttgcgcaccctgatctg

SEQ ID NO: 38788 - DNA, 260 bp, Artificial Sequence
  Description of Artificial Sequence: Synthetic polynucleotide
tcaaaggttgatgttactgctgataatgtagatatcatatttaaattccaactcgcttaattgcgagtttttatttcgtttatttcaattaaggtaactaaaaaactccttttaaggagtttctgtaatcaattaatttcttcaatatattttatttggtcccatagttcatcagttatctcatgcatagaaggtttttgttttgtttgtattagatatcctttctccttaagcatgttaactactttctttagtttctg

SEQ ID NO: 38789 - DNA, 260 bp, Artificial Sequence
  Description of Artificial Sequence: Synthetic polynucleotide
ttaattaaaaaaatagacgtatggaacgataataaaattaagatccactggaatatttaattttttaggcgctttacgccttttttcgtatattaggtatttccaattgaaaccggttatatctaatatacgaaattatacaacaaaaagccccagtgaccattgcataatctgcaacaaccactagggctaaatttttattgacgttgtgagtaaacaactgaattgagttgctgttggttaacaccattggcaatatc

SEQ ID NO: 38790 - protein, 30 aa, Artificial Sequence
  Description of Artificial Sequence: Synthetic polypeptide
MDSLLMNRRKFLYQFKNVRWAKGRRETYLC

SEQ ID NO: 38791 - protein, 28 aa, Artificial Sequence
  Description of Artificial Sequence: Synthetic peptide
PKKRKVEGADKRTADGSEFESPKKKRKV

SEQ ID NO: 38792 - protein, 40 aa, Artificial Sequence
  Description of Artificial Sequence: Synthetic polypeptide
RKSGKIAAIWKRPRKPKKKRKVKRTADGSEFESPKKKRKV

SEQ ID NO: 38793 - DNA, 24 bp, Unknown
  Description of Unknown: Streptococcus phage Javan101 sequence
aagaagataagaaaatcagcctaa

SEQ ID NO: 38794 - protein, 17 aa, Artificial Sequence
  Description of Artificial Sequence: Synthetic peptide
KKTELQTTNAENKTKKL

SEQ ID NO: 38795 - protein, 19 aa, Artificial Sequence
  Description of Artificial Sequence: Synthetic peptide
KRGINDRNFWRGENGRKTR

SEQ ID NO: 38796 - protein, 16 aa, Artificial Sequence
  Description of Artificial Sequence: Synthetic peptide
KRPAATKKAGQAKKKK

SEQ ID NO: 38797 - protein, 30 aa, Rattus norvegicus
AHFKISGEKRPSTDPGKKAKNPKKKKKKDP

SEQ ID NO: 38798 - protein, 12 aa, Saccharomyces cerevisiae
AHRAKKMSKTHA

SEQ ID NO: 38799 - protein, 14 aa, Unknown
  Description of Unknown: NLS sequence
ASPEYVNLPINGNG

SEQ ID NO: 38800 - protein, 7 aa, Unknown
  Description of Unknown: NLS sequence
CTKRPRW

SEQ ID NO: 38801 - protein, 16 aa, Unknown
  Description of Unknown: NLS sequence
DKAKRVSRNKSEKKRR

SEQ ID NO: 38802 - protein, 15 aa, Unknown
  Description of Unknown: NLS sequence
EELRLKEELLKGIYA

SEQ ID NO: 38803 - protein, 16 aa, Caenorhabditis elegans
EEQLRRRKNSRLNNTG

SEQ ID NO: 38804 - protein, 24 aa, Unknown
  Description of Unknown: NLS sequence
EVLKVIRTGKRKKKAWKRMVTKVC

SEQ ID NO: 38805 - protein, 15 aa, Unknown
  Description of Unknown: NLS sequence
HHHHHHHHHHHHQPH

SEQ ID NO: 38806 - protein, 17 aa, Unknown
  Description of Unknown: NLS sequence
HKKKHPDASVNFSEFSK

SEQ ID NO: 38807 - protein, 6 aa, Oryza sativa
HKRTKK

SEQ ID NO: 38808 - protein, 29 aa, Unknown
  Description of Unknown: NLS sequence
IINGRKLKLKKSRRRSSQTSNNSFTSRRS

SEQ ID NO: 38809 - protein, 8 aa, Oryza sativa
KAEQERRK

SEQ ID NO: 38810 - protein, 18 aa, Unknown
  Description of Unknown: NLS sequence
KEKRKRREELFIEQKKRK

SEQ ID NO: 38811 - protein, 14 aa, Mus musculus
KKGKDEWFSRGKKP

SEQ ID NO: 38812 - protein, 12 aa, Homo sapiens
KKGPSVQKRKKT

SEQ ID NO: 38813 - protein, 16 aa, Unknown
  Description of Unknown: NLS sequence
KKKTVINDLLHYKKEK

SEQ ID NO: 38814 - protein, 17 aa, Unknown
  Description of Unknown: NLS sequence
KKNGGKGKNKPSAKIKK

SEQ ID NO: 38815 - protein, 13 aa, Unknown
  Description of Unknown: NLS sequence
KKPKWDDFKKKKK

SEQ ID NO: 38816 - protein, 6 aa, Unknown
  Description of Unknown: NLS sequence
KKRKKD

SEQ ID NO: 38817 - protein, 9 aa, Unknown
  Description of Unknown: NLS sequence
KKRRKRRRK

SEQ ID NO: 38818 - protein, 9 aa, Unknown
  Description of Unknown: NLS sequence
KKRRRRARK

SEQ ID NO: 38819 - protein, 7 aa, Homo sapiens
KKSKRGR

SEQ ID NO: 38820 - protein, 8 aa, Zea mays
KKSRKRGS

SEQ ID NO: 38821 - protein, 17 aa, Unknown
  Description of Unknown: NLS sequence
KKSTALSRELGKIMRRR

SEQ ID NO: 38822 - protein, 17 aa, Dictyostelium discoideum
KKSYQDPEIIAHSRPRK

SEQ ID NO: 38823 - protein, 17 aa, Unknown
  Description of Unknown: NLS sequence
KKTGKNRKLKSKRVKTR

SEQ ID NO: 38824 - protein, 17 aa, Oryza sativa
KKVSIAGQSGKLWRWKR

SEQ ID NO: 38825 - protein, 20 aa, Unknown
  Description of Unknown: NLS sequence
KKYENVVIKRSPRKRGRPRK

SEQ ID NO: 38826 - protein, 6 aa, Unknown
  Description of Unknown: NLS sequence
KNKKRK

SEQ ID NO: 38827 - protein, 6 aa, Unknown
  Description of Unknown: NLS sequence
KPKKKR

SEQ ID NO: 38828 - protein, 19 aa, Danio rerio
KRAMKDDSHGNSTSPKRRK

SEQ ID NO: 38829 - protein, 17 aa, Homo sapiens
KRANSNLVAAYEKAKKK

SEQ ID NO: 38830 - protein, 22 aa, Unknown
  Description of Unknown: NLS sequence
KRASEDTTSGSPPKKSSAGPKR

SEQ ID NO: 38831 - protein, 16 aa, Unknown
  Description of Unknown: NLS sequence
KRFKRRWMVRKMKTKK

SEQ ID NO: 38832 - protein, 16 aa, Homo sapiens
KRGLNSSFETSPKKVK

SEQ ID NO: 38833 - protein, 20 aa, Unknown
  Description of Unknown: NLS sequence
KRGNSSIGPNDLSKRKQRKK

SEQ ID NO: 38834 - protein, 23 aa, Unknown
  Description of Unknown: NLS sequence
KRIHSVSLSQSQIDPSKKVKRAK

SEQ ID NO: 38835 - protein, 15 aa, Homo sapiens
KRKGKLKNKGSKRKK

SEQ ID NO: 38836 - protein, 13 aa, Homo sapiens
KRRRRRRREKRKR

SEQ ID NO: 38837 - protein, 18 aa, Mus musculus
KRSNDRTYSPEEEKQRRA

SEQ ID NO: 38838 - protein, 21 aa, Unknown
  Description of Unknown: NLS sequence
KRTVATNGDASGAHRAKKMSK

SEQ ID NO: 38839 - protein, 20 aa, Unknown
  Description of Unknown: NLS sequence
KRVYNKGEDEQEHLPKGKKR

SEQ ID NO: 38840 - protein, 18 aa, Unknown
  Description of Unknown: NLS sequence
KSGKAPRRRAVSMDNSNK

SEQ ID NO: 38841 - protein, 19 aa, Homo sapiens
KVNFLDMSLDDIIIYKELE

SEQ ID NO: 38842 - protein, 15 aa, Tomato yellow leaf curl China virus
KVQHRIAKKTTRRRR

SEQ ID NO: 38843 - protein, 8 aa, Unknown
  Description of Unknown: NLS sequence
LSPSLSPL

SEQ ID NO: 38844 - protein, 52 aa, Unknown
  Description of Unknown: NLS sequence
MPQNEYIELHRKRYGYRLDYHEKKRKKESREAHERSKKAKKMIGLKAKLYHK

SEQ ID NO: 38845 - protein, 10 aa, Unknown
  Description of Unknown: NLS sequence
MVQLRPRASR

SEQ ID NO: 38846 - protein, 24 aa, Caenorhabditis elegans
NNKLLAKRRKGGASPKDDPMDDIK

SEQ ID NO: 38847 - protein, 20 aa, Unknown
  Description of Unknown: NLS sequence
NYKRPMDGTYGPPAKRHEGE

SEQ ID NO: 38848 - protein, 19 aa, Unknown
  Description of Unknown: NLS sequence
PDTKRAKLDSSETTMVKKK

SEQ ID NO: 38849 - protein, 7 aa, Unknown
  Description of Unknown: NLS sequence
PEKRTKI

SEQ ID NO: 38850 - protein, 8 aa, Unknown
  Description of Unknown: NLS sequence
PGGRGKKK

SEQ ID NO: 38851 - protein, 18 aa, Unknown
  Description of Unknown: NLS sequence
PGKMDKGEHRQERRDRPY

SEQ ID NO: 38852 - protein, 11 aa, Physarum polycephalum
PKKGDKYDKTD

SEQ ID NO: 38853 - protein, 7 aa, Unknown
  Description of Unknown: NLS sequence
PKKKSRK

SEQ ID NO: 38854 - protein, 7 aa, Caenorhabditis elegans
PKKNKPE

SEQ ID NO: 38855 - protein, 7 aa, Unknown
  Description of Unknown: NLS sequence
PKKRAKV

SEQ ID NO: 38856 - protein, 9 aa, Unknown
  Description of Unknown: NLS sequence
PKPKKLKVE

SEQ ID NO: 38857 - protein, 7 aa, Unknown
  Description of Unknown: NLS sequence
PKRGRGR

SEQ ID NO: 38858 - protein, 9 aa, Mammalian 1 orthobornavirus
PKRRLVDDA

SEQ ID NO: 38859 - protein, 7 aa, Unknown
  Description of Unknown: NLS sequence
PKRRRTY

SEQ ID NO: 38860 - protein, 6 aa, Unknown
  Description of Unknown: NLS sequence
PLFKRR

SEQ ID NO: 38861 - protein, 7 aa, Unknown
  Description of Unknown: NLS sequence
PLRKAKR

SEQ ID NO: 38862 - protein, 9 aa, Unknown
  Description of Unknown: NLS sequence
PPAKRKCIF

SEQ ID NO: 38863 - protein, 8 aa, Homo sapiens
PPARRRRL

SEQ ID NO: 38864 - protein, 8 aa, Unknown
  Description of Unknown: NLS sequence
PPKKKRKV

SEQ ID NO: 38865 - protein, 10 aa, Mus musculus
PPNKRMKVKH

SEQ ID NO: 38866 - protein, 13 aa, Mammalian 1 orthobornavirus
PPRIYPQLPSAPT

SEQ ID NO: 38867 - protein, 13 aa, Unknown
  Description of Unknown: NLS sequence
PQRSPFPKSSVKR

SEQ ID NO: 38868 - protein, 8 aa, Mammalian 1 orthobornavirus
PRPRKVPR

SEQ ID NO: 38869 - protein, 9 aa, Unknown
  Description of Unknown: NLS sequence
PRRRVQRKR

SEQ ID NO: 38870 - protein, 7 aa, Unknown
  Description of Unknown: NLS sequence
PRRVRLK

SEQ ID NO: 38871 - protein, 7 aa, Unknown
  Description of Unknown: NLS sequence
PSRKRPR

SEQ ID NO: 38872 - protein, 8 aa, Unknown
  Description of Unknown: NLS sequence
PSSKKRKV

SEQ ID NO: 38873 - protein, 7 aa, Drosophila melanogaster
PTKKRVK

SEQ ID NO: 38874 - protein, 9 aa, Unknown
  Description of Unknown: NLS sequence
QRPGPYDRP

SEQ ID NO: 38875 - protein, 18 aa, Unknown
  Description of Unknown: NLS sequence
RGKGGKGLGKGGAKRHRK

SEQ ID NO: 38876 - protein, 24 aa, Zea mays
RKAGKGGGGHKTTKKRSAKDEKVP

SEQ ID NO: 38877 - protein, 9 aa, Xenopus laevis
RKIKLKRAK

SEQ ID NO: 38878 - protein, 9 aa, Xenopus laevis
RKIKRKRAK

SEQ ID NO: 38879 - protein, 17 aa, Unknown
  Description of Unknown: NLS sequence
RKKEAPGPREELRSRGR

SEQ ID NO: 38880 - protein, 7 aa, Unknown
  Description of Unknown: NLS sequence
RKKRKGK

SEQ ID NO: 38881 - protein, 9 aa, Unknown
  Description of Unknown: NLS sequence
RKKRRQRRR

SEQ ID NO: 38882 - protein, 25 aa, Homo sapiens
RKKSIPLSIKNLKRKHKRKKNKITR

SEQ ID NO: 38883 - protein, 20 aa, Homo sapiens
RKLVKPKNTKMKTKLRTNPY

SEQ ID NO: 38884 - protein, 16 aa, Unknown
  Description of Unknown: NLS sequence
RKRLILSDKGQLDWKK

SEQ ID NO: 38885 - protein, 7 aa, Homo sapiens
RKRLKSK

SEQ ID NO: 38886 - protein, 9 aa, Unknown
  Description of Unknown: NLS sequence
RKRRVRDNM

SEQ ID NO: 38887 - protein, 22 aa, Homo sapiens
RKRSPKDKKEKDLDGAGKRRKT

SEQ ID NO: 38888 - protein, 22 aa, Homo sapiens
RKRTPRVDGQTGENDMNKRRRK

SEQ ID NO: 38889 - protein, 10 aa, Unknown
  Description of Unknown: NLS sequence
RLPVRRRRRR

SEQ ID NO: 38890 - protein, 10 aa, Feline immunodeficiency virus
RLRFRKPKSK

SEQ ID NO: 38891 - protein, 6 aa, Homo sapiens
RQQRKR

SEQ ID NO: 38892 - protein, 16 aa, Mus musculus
RRDLNSSFETSPKKVK

SEQ ID NO: 38893 - protein, 8 aa, Arabidopsis thaliana
RRDRAKLR

SEQ ID NO: 38894 - protein, 8 aa, Unknown
  Description of Unknown: NLS sequence
RRGDGRRR

SEQ ID NO: 38895 - protein, 11 aa, Unknown
  Description of Unknown: NLS sequence
RRGRKRKAEKQ

SEQ ID NO: 38896 - protein, 6 aa, Unknown
  Description of Unknown: NLS sequence
RRKKRR

SEQ ID NO: 38897 - protein, 19 aa, Mus musculus
RRKRSKSEDMDSVESKRRR

SEQ ID NO: 38898 - protein, 6 aa, Unknown
  Description of Unknown: NLS sequence
RRKRSR

SEQ ID NO: 38899 - protein, 14 aa, Homo sapiens
RRPKGKTLQKRKPK

SEQ ID NO: 38900 - protein, 18 aa, Unknown
  Description of Unknown: NLS sequence
RRRGFERFGPDNMGRKRK

SEQ ID NO: 38901 - protein, 15 aa, Unknown
  Description of Unknown: NLS sequence
RRRGKNKVAAQNCRK

SEQ ID NO: 38902 - protein, 6 aa, Unknown
  Description of Unknown: NLS sequence
RRRKRR

SEQ ID NO: 38903 - protein, 14 aa, Unknown
  Description of Unknown: NLS sequence
RRRQKQKGGASRRR

SEQ ID NO: 38904 - protein, 13 aa, Unknown
  Description of Unknown: NLS sequence
RRRREGPRARRRR

SEQ ID NO: 38905 - protein, 61 aa, Unknown
  Description of Unknown: NLS sequence
RRTIRLKLVYDKCDRSCKIQKKNRNKCQYCRFHKCLSVGMSHNAIRFGRMPRSEKAKLKAE

SEQ ID NO: 38906 - protein, 17 aa, Unknown
  Description of Unknown: NLS sequence
RRVPQRKEVSRCRKCRK

SEQ ID NO: 38907 - protein, 32 aa, Human mastadenovirus C
RVGGRRQAVECIEDLLNEPGQPLDLSCKRPRP

SEQ ID NO: 38908 - protein, 9 aa, Unknown
  Description of Unknown: NLS sequence
RVVKLRIAP

SEQ ID NO: 38909 - protein, 6 aa, Mus musculus
RVVRRR

SEQ ID NO: 38910 - protein, 12 aa, Unknown
  Description of Unknown: NLS sequence
SKRKTKISRKTR

SEQ ID NO: 38911 - protein, 16 aa, Squash leaf curl virus
SYVKTVPNRTRTYIKL

SEQ ID NO: 38912 - protein, 12 aa, Unknown
  Description of Unknown: NLS sequence
TGKNEAKKRKIA

SEQ ID NO: 38913 - protein, 30 aa, Unknown
  Description of Unknown: NLS sequence
TLSPASSPSSVSCPVIPASTDESPGSALNI

SEQ ID NO: 38914 - protein, 12 aa, Unknown
  Description of Unknown: NLS sequence
VSKKQRTGKKIH

SEQ ID NO: 38915 - protein, 9 aa, Unknown
  Description of Unknown: NLS sequence
SPKKKRKVE

SEQ ID NO: 38916 - protein, 19 aa, Unknown
  Description of Unknown: NLS sequence
KRTADGSEFESPKKKRKVE

SEQ ID NO: 38917 - protein, 9 aa, Unknown
  Description of Unknown: NLS sequence
PAAKRVKLD

SEQ ID NO: 38918 - protein, 7 aa, Unknown
  Description of Unknown: NLS sequence
PKKKRKV

SEQ ID NO: 38919 - protein, 11 aa, Unknown
  Description of Unknown: NLS sequence
SPKKKRKVEAS

SEQ ID NO: 38920 - protein, 16 aa, Unknown
  Description of Unknown: NLS sequence
MAPKKKRKVGIHRGVP

SEQ ID NO: 38921 - protein, 29 aa, Artificial Sequence
  Description of Artificial Sequence: Synthetic peptide
PKKKRKVEGADKRTADGSEFESPKKKRKV

SEQ ID NO: 38922 - protein, 1082 aa, Neisseria meningitidis
MAAFKPNPINYILGLDIGIASVGWAMVEIDEEENPIRLIDLGVRVFERAEVPKTGDSLAMARRLARSVRRLTRRRAHRLLRARRLLKREGVLQAADFDENGLIKSLPNTPWQLRAAALDRKLTPLEWSAVLLHLIKHRGYLSQRKNEGETADKELGALLKGVANNAHALQTGDFRTPAELALNKFEKESGHIRNQRGDYSHTFSRKDLQAELILLFEKQKEFGNPHVSGGLKEGIETLLMTQRPALSGDAVQKMLGHCTFEPAEPKAAKNTYTAERFIWLTKLNNLRILEQGSERPLTDTERATLMDEPYRKSKLTYAQARKLLGLEDTAFFKGLRYGKDNAEASTLMEMKAYHAISRALEKEGLKDKKSPLNLSSELQDEIGTAFSLFKTDEDITGRLKDRVQPEILEALLKHISFDKFVQISLKALRRIVPLMEQGKRYDEACAEIYGDHYGKKNTEEKIYLPPIPADEIRNPVVLRALSQARKVINGVVRRYGSPARIHIETAREVGKSFKDRKEIEKRQEENRKDREKAAAKFREYFPNFVGEPKSKDILKLRLYEQQHGKCLYSGKEINLVRLNEKGYVEIDHALPFSRTWDDSFNNKVLVLGSENQNKGNQTPYEYFNGKDNSREWQEFKARVETSRFPRSKKQRILLQKFDEDGFKECNLNDTRYVNRFLCQFVADHILLTGKGKRRVFASNGQITNLLRGFWGLRKVRAENDRHHALDAVVVACSTVAMQQKITRFVRYKEMNAFDGKTIDKETGKVLHQKTHFPQPWEFFAQEVMIRVFGKPDGKPEFEEADTPEKLRTLLAEKLSSRPEAVHEYVTPLFVSRAPNRKMSGAHKDTLRSAKRFVKHNEKISVKRVWLTEIKLADLENMVNYKNGREIELYEALKARLEAYGGNAKQAFDPKDNPFYKKGGQLVKAVRVEKTQESGVLLNKKNAYTIADNGDMVRVDVFCKVDKKGKNQYFIVPIYAWQVAENILPDIDCKGYRIDDSYTFCFSLHKYDLIAFQKDEKSKVEFAYYINCDSSNGRFYLAWHDKGSKEQQFRISTQNLVLIQKYQVNELGKEIRPCRLKKRPPVR

SEQ ID NO: 38923 - protein, 1055 aa, Pasteurella pneumotropica
MQNNPLNYILGLDLGIASIGWAVVEIDEESSPIRLIDVGVRTFERAEVAKTGESLALSRRLARSSRRLIKRRAERLKKAKRLLKAEKILHSIDEKLPINVWQLRVKGLKEKLERQEWAAVLLHLSKHRGYLSQRKNEGKSDNKELGALLSGIASNHQMLQSSEYRTPAEIAVKKFQVEEGHIRNQRGSYTHTFSRLDLLAEMELLFQRQAELGNSYTSTTLLENLTALLMWQKPALAGDAILKMLGKCTFEPSEYKAAKNSYSAERFVWLTKLNNLRILENGTERALNDNERFALLEQPYEKSKLTYAQVRAMLALSDNAIFKGVRYLGEDKKTVESKTTLIEMKFYHQIRKTLGSAELKKEWNELKGNSDLLDEIGTAFSLYKTDDDICRYLEGKLPERVLNALLENLNFDKFIQLSLKALHQILPLMLQGQRYDEAVSAIYGDHYGKKSTETTRLLPTIPADEIRNPVVLRTLTQARKVINAVVRLYGSPARIHIETAREVGKSYQDRKKLEKQQEDNRKQRESAVKKFKEMFPHFVGEPKGKDILKMRLYELQQAKCLYSGKSLELHRLLEKGYVEVDHALPFSRTWDDSFNNKVLVLANENQNKGNLTPYEWLDGKNNSERWQHFVVRVQTSGFSYAKKQRILNHKLDEKGFIERNLNDTRYVARFLCNFIADNMLLVGKGKRNVFASNGQITALLRHRWGLQKVREQNDRHHALDAVVVACSTVAMQQKITRFVRYNEGNVFSGERIDRETGEIIPLHFPSPWAFFKENVEIRIFSENPKLELENRLPDYPQYNHEWVQPLFVSRMPTRKMTGQGHMETVKSAKRLNEGLSVLKVPLTQLKLSDLERMVNRDREIALYESLKARLEQFGNDPAKAFAEPFYKKGGALVKAVRLEQTQKSGVLVRDGNGVADNASMVRVDVFTKGGKYFLVPIYTWQVAKGILPNRAATQGKDENDWDIMDEMATFQFSLCQNDLIKLVTKKKTIFGYFNGLNRATSNINIKEHDLDKSKGKLGIYLEVGVKLAISLEKYQVDELGKNIRPCRPTKRQHVR

SEQ ID NO: 38924 - protein, 1053 aa, Staphylococcus aureus
MKRNYILGLDIGITSVGYGIIDYETRDVIDAGVRLFKEANVENNEGRRSKRGARRLKRRRRHRIQRVKKLLFDYNLLTDHSELSGINPYEARVKGLSQKLSEEEFSAALLHLAKRRGVHNVNEVEEDTGNELSTKEQISRNSKALEEKYVAELQLERLKKDGEVRGSINRFKTSDYVKEAKQLLKVQKAYHQLDQSFIDTYIDLLETRRTYYEGPGEGSPFGWKDIKEWYEMLMGHCTYFPEELRSVKYAYNADLYNALNDLNNLVITRDENEKLEYYEKFQIIENVFKQKKKPTLKQIAKEILVNEEDIKGYRVTSTGKPEFTNLKVYHDIKDITARKEIIENAELLDQIAKILTIYQSSEDIQEELTNLNSELTQEEIEQISNLKGYTGTHNLSLKAINLILDELWHTNDNQIAIFNRLKLVPKKVDLSQQKEIPTTLVDDFILSPVVKRSFIQSIKVINAIIKKYGLPNDIIIELAREKNSKDAQKMINEMQKRNRQTNERIEEIIRTTGKENAKYLIEKIKLHDMQEGKCLYSLEAIPLEDLLNNPFNYEVDHIIPRSVSFDNSFNNKVLVKQEENSKKGNRTPFQYLSSSDSKISYETFKKHILNLAKGKGRISKTKKEYLLEERDINRFSVQKDFINRNLVDTRYATRGLMNLLRSYFRVNNLDVKVKSINGGFTSFLRRKWKFKKERNKGYKHHAEDALIIANADFIFKEWKKLDKAKKVMENQMFEEKQAESMPEIETEQEYKEIFITPHQIKHIKDFKDYKYSHRVDKKPNRELINDTLYSTRKDDKGNTLIVNNLNGLYDKDNDKLKKLINKSPEKLLMYHHDPQTYQKLKLIMEQYGDEKNPLYKYYEETGNYLTKYSKKDNGPVIKKIKYYGNKLNAHLDITDDYPNSRNKVVKLSLKPYRFDVYLDNGVYKFVTVKNLDVIKKENYYEVNSKCYEEAKKLKKISNQAEFIASFYNNDLIKINGELYRVIGVNNDLLNRIEVNMIDITYREYLENMNDKRPPRIIKTIASKTQSIKKYSTDILGNLYEVKSKKHPQIIKKG

SEQ ID NO: 38925 - protein, 1053 aa, Staphylococcus aureus
MKRNYILGLDIGITSVGYGIIDYETRDVIDAGVRLFKEANVENNEGRRSKRGARRLKRRRRHRIQRVKKLLFDYNLLTDHSELSGINPYEARVKGLSQKLSEEEFSAALLHLAKRRGVHNVNEVEEDTGNELSTKEQISRNSKALEEKYVAELQLERLKKDGEVRGSINRFKTSDYVKEAKQLLKVQKAYHQLDQSFIDTYIDLLETRRTYYEGPGEGSPFGWKDIKEWYEMLMGHCTYFPEELRSVKYAYNADLYNALNDLNNLVITRDENEKLEYYEKFQIIENVFKQKKKPTLKQIAKEILVNEEDIKGYRVTSTGKPEFTNLKVYHDIKDITARKEIIENAELLDQIAKILTIYQSSEDIQEELTNLNSELTQEEIEQISNLKGYTGTHNLSLKAINLILDELWHTNDNQIAIFNRLKLVPKKVDLSQQKEIPTTLVDDFILSPVVKRSFIQSIKVINAIIKKYGLPNDIIIELAREKNSKDAQKMINEMQKRNRQTNERIEEIIRTTGKENAKYLIEKIKLHDMQEGKCLYSLEAIPLEDLLNNPFNYEVDHIIPRSVSFDNSFNNKVLVKQEENSKKGNRTPFQYLSSSDSKISYETFKKHILNLAKGKGRISKTKKEYLLEERDINRFSVQKDFINRNLVDTRYATRGLMNLLRSYFRVNNLDVKVKSINGGFTSFLRRKWKFKKERNKGYKHHAEDALIIANADFIFKEWKKLDKAKKVMENQMFEEKQAESMPEIETEQEYKEIFITPHQIKHIKDFKDYKYSHRVDKKPNRKLINDTLYSTRKDDKGNTLIVNNLNGLYDKDNDKLKKLINKSPEKLLMYHHDPQTYQKLKLIMEQYGDEKNPLYKYYEETGNYLTKYSKKDNGPVIKKIKYYGNKLNAHLDITDDYPNSRNKVVKLSLKPYRFDVYLDNGVYKFVTVKNLDVIKKENYYEVNSKCYEEAKKLKKISNQAEFIASFYKNDLIKINGELYRVIGVNNDLLNRIEVNMIDITYREYLENMNDKRPPHIIKTIASKTQSIKKYSTDILGNLYEVKSKKHPQIIKKG

SEQ ID NO: 38926 - protein, 1061 aa, Staphylococcus auricularis
MQENQQKQNYILGLDIGITSVGYGLIDSKTREVIDAGVRLFPEADSENNSNRRSKRGARRLKRRRIHRLNRVKDLLADYQMIDLNNVPKSTDPYTIRVKGLREPLTKEEFAIALLHIAKRRGLHNISVSMGDEEQDNELSTKQQLQKNAQQLQDKYVCELQLERLTNINKVRGEKNRFKTEDFVKEVKQLCETQRQYHNIDDQFIQQYIDLVSTRREYFEGPGNGSPYGWDGDLLKWYEKLMGRCTYFPEELRSVKYAYSADLFNALNDLNNLVVTRDDNPKLEYYEKYHIIENVFKQKKNPTLKQIAKEIGVQDYDIRGYRITKSGKPQFTSFKLYHDLKNIFEQAKYLEDVEMLDEIAKILTIYQDEISIKKALDQLPELLTESEKSQIAQLTGYTGTHRLSLKCIHIVIDELWESPENQMEIFTRLNLKPKKVEMSEIDSIPTTLVDEFILSPVVKRAFIQSIKVINAVINRFGLPEDIIIELAREKNSKDRRKFINKLQKQNEATRKKIEQLLAKYGNTNAKYMIEKIKLHDMQEGKCLYSLEAIPLEDLLSNPTHYEVDHIIPRSVSFDNSLNNKVLVKQSENSKKGNRTPYQYLSSNESKISYNQFKQHILNLSKAKDRISKKKRDMLLEERDINKFEVQKEFINRNLVDTRYATRELSNLLKTYFSTHDYAVKVKTINGGFTNHLRKVWDFKKHRNHGYKHHAEDALVIANADFLFKTHKALRRTDKILEQPGLEVNDTTVKVDTEEKYQELFETPKQVKNIKQFRDFKYSHRVDKKPNRQLINDTLYSTREIDGETYVVQTLKDLYAKDNEKVKKLFTERPQKILMYQHDPKTFEKLMTILNQYAEAKNPLAAYYEDKGEYVTKYAKKGNGPAIHKIKYIDKKLGSYLDVSNKYPETQNKLVKLSLKSFRFDIYKCEQGYKMVSIGYLDVLKKDNYYYIPKDKYEAEKQKKKIKESDLFVGSFYYNDLIMYEDELFRVIGVNSDINNLVELNMVDITYKDFCEVNNVTGEKRIKKTIGKRVVLIEKYTTDILGNLYKTPLPKKPQLIFKRGEL

SEQ ID NO: 38927 - protein, 1061 aa, Staphylococcus auricularis
MQENQQKQNYILGLDIGITSVGYGLIDSKTREVIDAGVRLFPEADSENNSNRRSKRGARRLKRRRIHRLNRVKDLLADYQMIDLNNVPKSTDPYTIRVKGLREPLTKEEFAIALLHIAKRRGLHNISVSMGDEEQDNELSTKQQLQKNAQQLQDKYVCELQLERLTNINKVRGEKNRFKTEDFVKEVKQLCETQRQYHNIDDQFIQQYIDLVSTRREYFEGPGNGSPYGWDGDLLKWYEKLMGRCTYFPEELRSVKYAYSADLFNALNDLNNLVVTRDDNPKLEYYEKYHIIENVFKQKKNPTLKQIAKEIGVQDYDIRGYRITKSGKPQFTSFKLYHDLKNIFEQAKYLEDVEMLDEIAKILTIYQDEISIKKALDQLPELLTESEKSQIAQLTGYTGTHRLSLKCIHIVIDELWESPENQMEIFTRLNLKPKKVEMSEIDSIPTTLVDEFILSPVVKRAFIQSIKVINAVINRFGLPEDIIIELAREKNSKDRRKFINKLQKQNEATRKKIEQLLAKYGNTNAKYMIEKIKLHDMQEGKCLYSLEAIPLEDLLSNPTHYEVDHIIPRSVSFDNSLNNKVLVKQSENSKKGNRTPYQYLSSNESKISYNQFKQHILNLSKAKDRISKKKRDMLLEERDINKFEVQKEFINRNLVDTRYATRELSNLLKTYFSTHDYAVKVKTINGGFTNHLRKVWDFKKHRNHGYKHHAEDALVIANADFLFKTHKALRRTDKILEQPGLEVNDTTVKVDTEEKYQELFETPKQVKNIKQFRDFKYSHRVDKKPNRKLINDTLYSTREIDGETYVVQTLKDLYAKDNEKVKKLFTERPQKILMYQHDPKTFEKLMTILNQYAEAKNPLAAYYEDKGEYVTKYAKKGNGPAIHKIKYIDKKLGSYLDVSNKYPETQNKLVKLSLKSFRFDIYKCEQGYKMVSIGYLDVLKKDNYYYIPKDKYEAEKQKKKIKESDLFVGSFYKNDLIMYEDELFRVIGVNSDINNLVELNMVDITYKDFCEVNNVTGEKHIKKTIGKRVVLIEKYTTDILGNLYKTPLPKKPQLIFKRGEL

SEQ ID NO: 38928 - protein, 1375 aa, Streptococcus canis
MEKKYSIGLDIGTNSVGWAVITDDYKVPSKKFKVLGNTNRKSIKKNLMGALLFDSGETAEATRLKRTARRRYTRRKNRIRYLQEIFANEMAKLDDSFFQRLEESFLVEEDKKNERHPIFGNLADEVAYHRNYPTIYHLRKKLADSPEKADLRLIYLALAHIIKFRGHFLIEGKLNAENSDVAKLFYQLIQTYNQLFEESPLDEIEVDAKGILSARLSKSKRLEKLIAVFPNEKKNGLFGNIIALALGLTPNFKSNFDLTEDAKLQLSKDTYDDDLDELLGQIGDQYADLFSAAKNLSDAILLSDILRSNSEVTKAPLSASMVKRYDEHHQDLALLKTLVRQQFPEKYAEIFKDDTKNGYAGYVGADKKLRKRSGKLATEEEFYKFIKPILEKMDGAEELLAKLNRDDLLRKQRTFDNGSIPHQIHLKELHAILRRQEEFYPFLKENREKIEKILTFRIPYYVGPLARGNSRFAWLTRKSEEAITPWNFEEVVDKGASAQSFIERMTNFDEQLPNKKVLPKHSLLYEYFTVYNELTKVKYVTERMRKPEFLSGEQKKAIVDLLFKTNRKVTVKQLKEDYFKKIECFDSVEIIGVEDRFNASLGTYHDLLKIIKDKDFLDNEENEDILEDIVLTLTLFEDREMIEERLKTYAHLFDDKVMKQLKRRHYTGWGRLSRKMINGIRDKQSGKTILDFLKSDGFSNRNFMQLIHDDSLTFKEEIEKAQVSGQGDSLHEQIADLAGSPAIKKGILQTVKIVDELVKVMGHKPENIVIEMARENQTTTKGLQQSRERKKRIEEGIKELESQILKENPVENTQLQNEKLYLYYLQNGRDMYVDQELDINRLSDYDVDHIVPQSFIKDDSIDNKVLTRSVENRGKSDNVPSEEVVKKMKNYWRQLLNAKLITQRKFDNLTKAERGGLSEADKAGFIKRQLVETRQITKHVARILDSRMNTKRDKNDKPIREVKVITLKSKLVSDFRKDFQLYKVRDINNYHHAHDAYLNAVVGTALIKKYPKLESEFVYGDYKVYDVRKMIAKSEQEIGKATAKRFFYSNIMNFFKTEVKLANGEIRKRPLIETNGETGEVVWNKEKDFATVRKVLAMPQVNIVKKTEVQTGGFSKESILSKRESAKLIPRKKGWDTRKYGGFGSPTVAYSILVVAKVEKGKAKKLKSVKVLVGITIMEKGSYEKDPIGFLEAKGYKDIKKELIFKLPKYSLFELENGRRRMLASAKELQKANELVLPQHLVRLLYYTQNISATTGSNNLGYIEQHREEFKEIFEKIIDFSEKYILKNKVNSNLKSSFDEQFAVSDSILLSNSFVSLLKYTSFGASGGFTFLDLDVKQGRLRYQTVTEVLDATLIYQSITGLYETRTDLSQLGGD

SEQ ID NO: 38929 - protein, 1368 aa, Streptococcus pyogenes [sequence omitted]

SEQ ID NO: 38930 - protein, 1368 aa, Streptococcus pyogenes
MDKKYSIGLDIGTNSVGWAVITDEYKVPSKKFKVLGNTDRHSIKKNLIGALLFDSGETAEATRLKRTARRRYTRRKNRICYLQEIFSNEMAKVDDSFFHRLEESFLVEEDKKHERHPIFGNIVDEVAYHEKYPTIYHLRKKLVDSTDKADLRLIYLALAHMIKFRGHFLIEGDLNPDNSDVDKLFIQLVQTYNQLFEENPINASGVDAKAILSARLSKSRRLENLIAQLPGEKKNGLFGNLIALSLGLTPNFKSNFDLAEDAKLQLSKDTYDDDLDNLLAQIGDQYADLFLAAKNLSDAILLSDILRVNTEITKAPLSASMIKRYDEHHQDLTLLKALVRQQLPEKYKEIFFDQSKNGYAGYIDGGASQEEFYKFIKPILEKMDGTEELLVKLNREDLLRKQRTFDNGSIPHQIHLGELHAILRRQEDFYPFLKDNREKIEKILTFRIPYYVGPLARGNSRFAWMTRKSEETITPWNFEEVVDKGASAQSFIERMTNFDKNLPNEKVLPKHSLLYEYFTVYNELTKVKYVTEGMRKPAFLSGEQKKAIVDLLFKTNRKVTVKQLKEDYFKKIECFDSVEISGVEDRFNASLGTYHDLLKIIKDKDFLDNEENEDILEDIVLTLTLFEDREMIEERLKTYAHLFDDKVMKQLKRRRYTGWGRLSRKLINGIRDKQSGKTILDFLKSDGFANRNFMQLIHDDSLTFKEDIQKAQVSGQGDSLHEHIANLAGSPAIKKGILQTVKVVDELVKVMGRHKPENIVIEMARENQTTQKGQKNSRERMKRIEEGIKELGSQILKEHPVENTQLQNEKLYLYYLQNGRDMYVDQELDINRLSDYDVDHIVPQSFLKDDSIDNKVLTRSDKNRGKSDNVPSEEVVKKMKNYWRQLLNAKLITQRKFDNLTKAERGGLSELDKAGFIKRQLVETRQITKHVAQILDSRMNTKYDENDKLIREVKVITLKSKLVSDFRKDFQFYKVREINNYHHAHDAYLNAVVGTALIKKYPKLESEFVYGDYKVYDVRKMIAKSEQEIGKATAKYFFYSNIMNFFKTEITLANGEIRKRPLIETNGETGEIVWDKGRDFATVRKVLSMPQVNIVKKTEVQTGGFSKESIRPKRNSDKLIARKKDWDPKKYGGFVSPTVAYSVLVVAKVEKGKSKKLKSVKELLGITIMERSSFEKNPIDFLEAKGYKEVKKDLIIKLPKYSLFELENGRKRMLASARFLQKGNELALPSKYVNFLYLASHYEKLKGSPEDNEQKQLFVEQHKHYLDEIIEQISEFSKRVILADANLDKVLSAYNKHRDKPIREQAENIIHLFTLTNLGAPRAFKYFDTTIDRKVYRSTKEVLDATLIHQSITGLYETRIDLSQLGGD

SEQ ID NO: 38931 - protein, 1368 aa, Streptococcus pyogenes
MDKKYSIGLDIGTNSVGWAVITDEYKVPSKKFKVLGNTDRHSIKKNLIGALLFDSGETAERTRLKRTARRRYTRRKNRICYLQEIFSNEMAKVDDSFFHRLEESFLVEEDKKHERHPIFGNIVDEVAYHEKYPTIYHLRKKLVDSTDKADLRLIYLALAHMIKFRGHFLIEGDLNPDNSDVDKLFIQLVQTYNQLFEENPINASGVDAKAILSARLSKSRRLENLIAQLPGEKKNGLFGNLIALSLGLTPNFKSNFDLAEDAKLQLSKDTYDDDLDNLLAQIGDQYADLFLAAKNLSDAILLSDILRVNTEITKAPLSASMIKRYDEHHQDLTLLKALVRQQLPEKYKEIFFDQSKNGYAGYIDGGASQEEFYKFIKPILEKMDGTEELLVKLNREDLLRKQRTFDNGSIPHQIHLGELHAILRRQEDFYPFLKDNREKIEKILTFRIPYYVGPLARGNSRFAWMTRKSEETITPWNFEEVVDKGASAQSFIERMTNFDKNLPNEKVLPKHSLLYEYFTVYNELTKVKYVTEGMRKPAFLSGEQKKAIVDLLFKTNRKVTVKQLKEDYFKKIECFDSVEISGVEDRFNASLGTYHDLLKIIKDKDFLDNEENEDILEDIVLTLTLFEDREMIEERLKTYAHLFDDKVMKQLKRRRYTGWGRLSRKLINGIRDKQSGKTILDFLKSDGFANRNFMQLIHDDSLTFKEDIQKAQVSGQGDSLHEHIANLAGSPAIKKGILQTVKVVDELVKVMGRHKPENIVIEMARENQTTQKGQKNSRERMKRIEEGIKELGSQILKEHPVENTQLQNEKLYLYYLQNGRDMYVDQELDINRLSDYDVDHIVPQSFLKDDSIDNKVLTRSDKNRGKSDNVPSEEVVKKMKNYWRQLLNAKLITQRKFDNLTKAERGGLSELDKAGFIKRQLVETRQITKHVAQILDSRMNTKYDENDKLIREVKVITLKSKLVSDFRKDFQFYKVREINNYHHAHDAYLNAVVGTALIKKYPKLESEFVYGDYKVYDVRKMIAKSEQEIGKATAKYFFYSNIMNFFKTEITLANGEIRKRPLIETNGETGEIVWDKGRDFATVRKVLSMPQVNIVKKTEVQTGGFSKESIRPKRNSDKLIARKKDWDPKKYGGFLWPTVAYSVLVVAKVEKGKSKKLKSVKELLGITIMERSSFEKNPIDFLEAKGYKEVKKDLIIKLPKYSLFELENGRKRMLASAKQLQKGNELALPSKYVNFLYLASHYEKLKGSPEDNEQKQLFVEQHKHYLDEIIEQISEFSKRVILADANLDKVLSAYNKHRDKPIREQAENIIHLFTLTRLGAPRAFKYFDTTIDPKQYRSTKEVLDATLIHQSITGLYETRIDLSQLGGD

SEQ ID NO: 38932 - protein, 1121 aa, Streptococcus thermophilus
MSDLVLGLDIGIGSVGVGILNKVTGEIIHKNSRIFPAAQAENNLVRRTNRQGRRLARRKKHRRVRLNRLFEESGLITDFTKISINLNPYQLRVKGLTDELSNEELFIALKNMVKHRGISYLDDASDDGNSSVGDYAQIVKENSKQLETKTPGQIQLERYQTYGQLRGDFTVEKDGKKHRLINVFPTSAYRSEALRILQTQQEFNPQITDEFINRYLEILTGKRKYYHGPGNEKSRTDYGRYRTSGETLDNIFGILIGKCTFYPDEFRAAKASYTAQEFNLLNDLNNLTVPTETKKLSKEQKNQIINYVKNEKAMGPAKLFKYIAKLLSCDVADIKGYRIDKSGKAEIHTFEAYRKMKTLETLDIEQMDRETLDKLAYVLTLNTEREGIQEALEHEFADGSFSQKQVDELVQFRKANSSIFGKGWHNFSVKLMMELIPELYETSEEQMTILTRLGKQKTTSSSNKTKYIDEKLLTEEIYNPVVAKSVRQAIKIVNAAIKEYGDFDNIVIEMARETNEDDEKKAIQKIQKANKDEKDAAMLKAANQYNGKAELPHSVFHGHKQLATKIRLWHQQGERCLYTGKTISIHDLINNSNQFEVDHILPLSITFDDSLANKVLVYATANQEKGQRTPYQALDSMDDAWSFRELKAFVRESKTLSNKKKEYLLTEEDISKFDVRKKFIERNLVDTRYASRVVLNALQEHFRAHKIDTKVSVVRGQFTSQLRRHWGIEKTRDTYHHHAVDALIIAASSQLNLWKKQKNTLVSYSEDQLLDIETGELISDDEYKESVFKAPYQHFVDTLKSKEFEDSILFSYQVDSKFNRKISDATIYATRQAKVGKDKADETYVLGKIKDIYTQDGYDAFMKIYKKDKSKFLMYRHDPQTFEKVIEPILENYPNKQINEKGKEVPCNPFLKYKEEHGYIRKYSKKGNGPEIKSLKYYDSKLGNHIDITPKDSNNKVVLQSVSPWRADVYFNKTTGKYEILGLKYADLQFEKGTGTYKISQEKYNDIKKKEGVDSDSEFKFTLYKNDLLLVKDTETKEQQLFRFLSRTMPKQKHYVELKPYDKQKFEGGEALIKVLGNVANSGQCKKGLGKSNISIYKVRTDVLGNQHIIKNEGDKPKLDF

SEQ ID NO: 38933 - protein, 1092 aa, Brevibacillus laterosporus
MAYTMGIDVGIASCGWAIVDLERQRIIDIGVRTFEKAENPKNGEALAVPRREARSSRRRLRRKKHRIERLKHMFVRNGLAVDIQHLEQTLRSQNEIDVWQLRVDGLDRMLTQKEWLRVLIHLAQRRGFQSNRKTDGSSEDGQVLVNVTENDRLMEEKDYRTVAEMMVKDEKFSDHKRNKNGNYHGVVSRSSLLVEIHTLFETQRQHHNSLASKDFELEYVNIWSAQRPVATKDQIEKMIGTCTFLPKEKRAPKASWHFQYFMLLQTINHIRITNVQGTRSLNKEEIEQVVNMALTKSKVSYHDTRKILDLSEEYQFVGLDYGKEDEKKKVESKETIIKLDDYHKLNKIFNEVELAKGETWEADDYDTVAYALTFFKDDEDIRDYLQNKYKDSKNRLVKNLANKEYTNELIGKVSTLSFRKVGHLSLKALRKIIPFLEQGMTYDKACQAAGFDFQGISKKKRSVVLPVIDQISNPVVNRALTQTRKVINALIKKYGSPETIHIETARELSKTFDERKNITKDYKENRDKNEHAKKHLSELGIINPTGLDIVKYKLWCEQQGRCMYSNQPISFERLKESGYTEVDHIIPYSRSMNDSYNNRVLVMTRENREKGNQTPFEYMGNDTQRWYEFEQRVTTNPQIKKEKRQNLLLKGFTNRRELEMLERNLNDTRYITKYLSHFISTNLEFSPSDKKKKVVNTSGRITSHLRSRWGLEKNRGQNDLHHAMDAIVIAVTSDSFIQQVTNYYKRKERRELNGDDKFPLPWKFFREEVIARLSPNPKEQIEALPNHFYSEDELADLQPIFVSRMPKRSITGEAHQAQFRRVVGKTKEGKNITAKKTALVDISYDKNGDFNMYGRETDPATYEAIKERYLEFGGNVKKAFSTDLHKPKKDGTKGPLIKSVRIMENKTLVHPVNKGKGVVYNSSIVRTDVFQRKEKYYLLPVYVTDVTKGKLPNKVIVAKKGYHDWIEVDDSFTFLFSLYPNDLIFIRQNPKKKISLKKRIESHSISDSKEVQEIHAYYKGVDSSTAAIEFIIHDGSYYAKGVGVQNLDCFEKYQVDILGNYFKVKGEKRLELETSDSNHKGKDVNSIKSTSR

SEQ ID NO: 38934 - protein, 1053 aa, Staphylococcus aureus
MKRNYILGLDIGITSVGYGIIDYETRDVIDAGVRLFKEANVENNEGRRSKRGARRLKRRRRHRIQRVKKLLFDYNLLTDHSELSGINPYEARVKGLSQKLSEEEFSAALLHLAKRRGVHNVNEVEEDTGNELSTKEQISRNSKALEEKYVAELQLERLKKDGEVRGSINRFKTSDYVKEAKQLLKVQKAYHQLDQSFIDTYIDLLETRRTYYEGPGEGSPFGWKDIKEWYEMLMGHCTYFPEELRSVKYAYNADLYNALNDLNNLVITRDENEKLEYYEKFQIIENVFKQKKKPTLKQIAKEILVNEEDIKGYRVTSTGKPEFTNLKVYHDIKDITARKEIIENAELLDQIAKILTIYQSSEDIQEELTNLNSELTQEEIEQISNLKGYTGTHNLSLKAINLILDELWHTNDNQIAIFNRLKLVPKKVDLSQQKEIPTTLVDDFILSPVVKRSFIQSIKVINAIIKKYGLPNDIIIELAREKNSKDAQKMINEMQKRNRQTNERIEEIIRTTGKENAKYLIEKIKLHDMQEGKCLYSLEAIPLEDLLNNPFNYEVDHIIPRSVSFDNSFNNKVLVKQEENSKKGNRTPFQYLSSSDSKISYETFKKHILNLAKGKGRISKTKKEYLLEERDINRFSVQKDFINRNLVDTRYATRGLMNLLRSYFRVNNLDVKVKSINGGFTSFLRRKWKFKKERNKGYKHHAEDALIIANADFIFKEWKKLDKAKKVMENQMFEEKQAESMPEIETEQEYKEIFITPHQIKHIKDFKDYKYSHRVDKKPNRKLINDTLYSTRKDDKGNTLIVNNLNGLYDKDNDKLKKLINKSPEKLLMYHHDPQTYQKLKLIMEQYGDEKNPLYKYYEETGNYLTKYSKKDNGPVIKKIKYYGNKLNAHLDITDDYPNSRNKVVKLSLKPYRFDVYLDNGVYKFVTVKNLDVIKKENYYEVNSKCYEEAKKLKKISNQAEFIASFYKNDLIKINGELYRVIGVNSDKNNLIEVNMIDITYREYLENMNDKRPPHIIKTIASKTQSIKKYSTDILGNLYEVKSKKHPQIIKKG

SEQ ID NO: 38935 - protein, 1053 aa, Staphylococcus aureus
MKRNYILGLDIGITSVGYGIIDYETRDVIDAGVRLFKEANVENNEGRRSKRGARRLKRRRRHRIQRVKKLLFDYNLLTDHSELSGINPYEARVKGLSQKLSEEEFSAALLHLAKRRGVHNVNEVEEDTGNELSTKEQISRNSKALEEKYVAELQLERLKKDGEVRGSINRFKTSDYVKEAKQLLKVQKAYHQLDQSFIDTYIDLLETRRTYYEGPGEGSPFGWKDIKEWYEMLMGHCTYFPEELRSVKYAYNADLYNALNDLNNLVITRDENEKLEYYEKFQIIENVFKQKKKPTLKQIAKEILVNEEDIKGYRVTSTGKPEFTNLKVYHDIKDITARKEIIENAELLDQIAKILTIYQSSEDIQEELTNLNSELTQEEIEQISNLKGYTGTHNLSLKAINLILDELWHTNDNQIAIFNRLKLVPKKVDLSQQKEIPTTLVDDFILSPVVKRSFIQSIKVINAIIKKYGLPNDIIIELAREKNSKDAQKMINEMQKRNRQTNERIEEIIRTTGKENAKYLIEKIKLHDMQEGKCLYSLEAIPLEDLLNNPFNYEVDHIIPRSVSFDNSFNNKVLVKQEENSKKGNRTPFQYLSSSDSKISYETFKKHILNLAKGKGRISKTKKEYLLEERDINRFSVQKDFINRNLVDTRYATRGLMNLLRSYFRVNNLDVKVKSINGGFTSFLRRKWKFKKERNKGYKHHAEDALIIANADFIFKEWKKLDKAKKVMENQMFEEKQAESMPEIETEQEYKEIFITPHQIKHIKDFKDYKYSHRVDKKPNRKLINDTLYSTRKDDKGNTLIVNNLNGLYDKDNDKLKKLINKSPEKLLMYHHDPQTYQKLKLIMEQYGDEKNPLYKYYEETGNYLTKYSKKDNGPVIKKIKYYGNKLNAHLDITDDYPNSRNKVVKLSLKPYRFDVYLDNGVYKFVTVKNLDVIKKENYYEVNSKCYEEAKKLKKISNQAEFIASFYKNDLIKINGELYRVIGVNNSTRNIVELNMIDITYREYLENMNDKRPPHIIKTIASKTQSIKKYSTDILGNLYEVKSKKHPQIIKKG

SEQ ID NO: 38936 - protein, 1053 aa, Staphylococcus aureus
MKRNYILGLDIGITSVGYGIIDYETRDVIDAGVRLFKEANVENNEGRRSKRGARRLKRRRRHRIQRVKKLLFDYNLLTDHSELSGINPYEARVKGLSQKLSEEEFSAALLHLAKRRGVHNVNEVEEDTGNELSTKEQISRNSKALEEKYVAELQLERLKKDGEVRGSINRFKTSDYVKEAKQLLKVQKAYHQLDQSFIDTYIDLLETRRTYYEGPGEGSPFGWKDIKEWYEMLMGHCTYFPEELRSVKYAYNADLYNALNDLNNLVITRDENEKLEYYEKFQIIENVFKQKKKPTLKQIAKEILVNEEDIKGYRVTSTGKPEFTNLKVYHDIKDITARKEIIENAELLDQIAKILTIYQSSEDIQEELTNLNSELTQEEIEQISNLKGYTGTHNLSLKAINLILDELWHTNDNQIAIFNRLKLVPKKVDLSQQKEIPTTLVDDFILSPVVKRSFIQSIKVINAIIKKYGLPNDIIIELAREKNSKDAQKMINEMQKRNRQTNERIEEIIRTTGKENAKYLIEKIKLHDMQEGKCLYSLEAIPLEDLLNNPFNYEVDHIIPRSVSFDNSFNNKVLVKQEENSKKGNRTPFQYLSSSDSKISYETFKKHILNLAKGKGRISKTKKEYLLEERDINRFSVQKDFINRNLVDTRYATRGLMNLLRSYFRVNNLDVKVKSINGGFTSFLRRKWKFKKERNKGYKHHAEDALIIANADFIFKEWKKLDKAKKVMENQMFEEKQAESMPEIETEQEYKEIFITPHQIKHIKDFKDYKYSHRVDKKPNRKLINDTLYSTRKDDKGNTLIVNNLNGLYDKDNDKLKKLINKSPEKLLMYHHDPQTYQKLKLIMEQYGDEKNPLYKYYEETGNYLTKYSKKDNGPVIKKIKYYGNKLNAHLDITDDYPNSRNKVVKLSLKPYRFDVYLDNGVYKFVTVKNLDVIKKENYYEVNSKCYEEAKKLKKISNQAEFIASFYKNDLIKINGELYRVIGVNSDDRNIIELNMIDITYREYLENMNDKRPPHIIKTIASKTQSIKKYSTDILGNLYEVKSKKHPQIIKKG

SEQ ID NO: 38937 - protein, 1053 aa, Staphylococcus aureus
MKRNYILGLDIGITSVGYGIIDYETRDVIDAGVRLFKEANVENNEGRRSKRGARRLKRRRRHRIQRVKKLLFDYNLLTDHSELSGINPYEARVKGLSQKLSEEEFSAALLHLAKRRGVHNVNEVEEDTGNELSTKEQISRNSKALEEKYVAELQLERLKKDGEVRGSINRFKTSDYVKEAKQLLKVQKAYHQLDQSFIDTYIDLLETRRTYYEGPGEGSPFGWKDIKEWYEMLMGHCTYFPEELRSVKYAYNADLYNALNDLNNLVITRDENEKLEYYEKFQIIENVFKQKKKPTLKQIAKEILVNEEDIKGYRVTSTGKPEFTNLKVYHDIKDITARKEIIENAELLDQIAKILTIYQSSEDIQEELTNLNSELTQEEIEQISNLKGYTGTHNLSLKAINLILDELWHTNDNQIAIFNRLKLVPKKVDLSQQKEIPTTLVDDFILSPVVKRSFIQSIKVINAIIKKYGLPNDIIIELAREKNSKDAQKMINEMQKRNRQTNERIEEIIRTTGKENAKYLIEKIKLHDMQEGKCLYSLEAIPLEDLLNNPFNYEVDHIIPRSVSFDNSFNNKVLVKQEENSKKGNRTPFQYLSSSDSKISYETFKKHILNLAKGKGRISKTKKEYLLEERDINRFSVQKDFINRNLVDTRYATRGLMNLLRSYFRVNNLDVKVKSINGGFTSFLRRKWKFKKERNKGYKHHAEDALIIANADFIFKEWKKLDKAKKVMENQMFEEKQAESMPEIETEQEYKEIFITPHQIKHIKDFKDYKYSHRVDKKPNRKLINDTLYSTRKDDKGNTLIVNNLNGLYDKDNDKLKKLINKSPEKLLMYHHDPQTYQKLKLIMEQYGDEKNPLYKYYEETGNYLTKYSKKDNGPVIKKIKYYGNKLNAHLDITDDYPNSRNKVVKLSLKPYRFDVYLDNGVYKFVTVKNLDVIKKENYYEVNSKCYEEAKKLKKISNQAEFIASFYKNDLIKINGELYRVIGVNNNRLNKIELNMIDITYREYLENMNDKRPPHIIKTIASKTQSIKKYSTDILGNLYEVKSKKHPQIIKKG

SEQ ID NO: 38938 - protein, 1084 aa, Corynebacterium diphtheriae
MKYHVGIDVGTFSVGLAAIEVDDAGMPIKTLSLVSHIHDSGLDPDEIKSAVTRLASSGIARRTRRLYRRKRRRLQQLDKFIQRQGWPVIELEDYSDPLYPWKVRAELAASYIADEKERGEKLSVALRHIARHRGWRNPYAKVSSLYLPDGPSDAFKAIREEIKRASGQPVPETATVGQMVTLCELGTLKLRGEGGVLSARLQQSDYAREIQEICRMQEIGQELYRKIIDVVFAAESPKGSASSRVGKDPLQPGKNRALKASDAFQRYRIAALIGNLRVRVDGEKRILSVEEKNLVFDHLVNLTPKKEPEWVTIAEILGIDRGQLIGTATMTDDGERAGARPPTHDTNRSIVNSRIAPLVDWWKTASALEQHAMVKALSNAEVDDFDSPEGAKVQAFFADLDDDVHAKLDSLHLPVGRAAYSEDTLVRLTRRMLSDGVDLYTARLQEFGIEPSWTPPTPRIGEPVGNPAVDRVLKTVSRWLESATKTWGAPERVIIEHVREGFVTEKRAREMDGDMRRRAARNAKLFQEMQEKLNVQGKPSRADLWRYQSVQRQNCQCAYCGSPITFSNSEMDHIVPRAGQGSTNTRENLVAVCHRCNQSKGNTPFAIWAKNTSIEGVSVKEAVERTRHWVTDTGMRSTDFKKFTKAVVERFQRATMDEEIDARSMESVAWMANELRSRVAQHFASHGTTVRVYRGSLTAEARRASGISGKLKFFDGVGKSRLDRRHHAIDAAVIAFTSDYVAETLAVRSNLKQSQAHRQEAPQWREFTGKDAEHRAAWRVWCQKMEKLSALLTEDLRDDRVVVMSNVRLRLGNGSAHKETIGKLSKVKLSSQLSVSDIDKASSEALWCALTREPGFDPKEGLPANPERHIRVNGTHVYAGDNIGLFPVSAGSIALRGGYAELGSSFHHARVYKITSGKKPAFAMLRVYTIDLLPYRNQDLFSVELKPQTMSMRQAEKKLRDALATGNAEYLGWLVVDDELVVDTSKIATDQVKAVEAELGTIRRWRVDGFFSPSKLRLRPLQMSKEGIKKESAPELSKIIDRPGWLPAVNKLFSDGNVTVVRRDSLGRVRLESTAHLPVTWKVQ

SEQ ID NO: 38939 - protein, 984 aa, Campylobacter jejuni
MARILAFDIGISSIGWAFSENDELKDCGVRIFTKVENPKTGESLALPRRLARSARKRLARRKARLNHLKHLIANEFKLNYEDYQSFDESLAKAYKGSLISPYELRFRALNELLSKQDFARVILHIAKRRGYDDIKNSDDKEKGAILKAIKQNEEKLANYQSVGEYLYKEYFQKFKENSKEFTNVRNKKESYERCIAQSFLKDELKLIFKKQREFGFSFSKKFEEEVLSVAFYKRALKDFSHLVGNCSFFTDEKRAPKNSPLAFMFVALTRIINLLNNLKNTEGILYTKDDLNALLNEVLKNGTLTYKQTKKLLGLSDDYEFKGEKGTYFIEFKKYKEFIKALGEHNLSQDDLNEIAKDITLIKDEIKLKKALAKYDLNQNQIDSLSKLEFKDHLNISFKALKLVTPLMLEGKKYDEACNELNLKVAINEDKKDFLPAFNETYYKDEVTNPVVLRAIKEYRKVLNALLKKYGKVHKINIELAREVGKNHSQRAKIEKEQNENYKAKKDAELECEKLGLKINSKNILKLRLFKEQKEFCAYSGEKIKISDLQDEKMLEIDHIYPYSRSFDDSYMNKVLVFTKQNQEKLNQTPFEAFGNDSAKWQKIEVLAKNLPTKKQKRILDKNYKDKEQKNFKDRNLNDTRYIARLVLNYTKDYLDFLPLSDDENTKLNDTQKGSKVHVEAKSGMLTSALRHTWGFSAKDRNNHLHHAIDAVIIAYANNSIVKAFSDFKKEQESNSAELYAKKISELDYKNKRKFFEPFSGFRQKVLDKIDEIFVSKPERKKPSGALHEETFRKEEEFYQSYGGKEGVLKALELGKIRKVNGKIVKNGDMFRVDIFKHKKTNKFYAVPIYTMDFALKVLPNKAVARSKKGEIKDWILMDENYEFCFSLYKDSLILIQTKDMQEPEFVYYNAFTSSTVSLIVSKHDNKFETLSKNQKILFKNANEKEVIAKSIGIQNLKVFEKYIVSALGEVTKAEFRQREDFKK

SEQ ID NO: 38940 - protein, 1087 aa, Geobacillus stearothermophilus
MRYKIGLDIGITSVGWAVMNLDIPRIEDLGVRIFDRAENPQTGESLALPRRLARSARRRLRRRKHRLERIRRLVIREGILTKEELDKLFEEKHEIDVWQLRVEALDRKLNNDELARVLLHLAKRRGFKSNRKSERSNKENSTMLKHIEENRAILSSYRTVGEMIVKDPKFALHKRNKGENYTNTIARDDLEREIRLIFSKQREFGNMSCTEEFENEYITIWASQRPVASKDDIEKKVGFCTFEPKEKRAPKATYTFQSFIAWEHINKLRLISPSGARGLTDEERRLLYEQAFQKNKITYHDIRTLLHLPDDTYFKGIVYDRGESRKQNENIRFLELDAYHQIRKAVDKVYGKGKSSSFLPIDFDTFGYALTLFKDDADIHSYLRNEYEQNGKRMPNLANKVYDNELIEELLNLSFTKFGHLSLKALRSILPYMEQGEVYSSACERAGYTFTGPKKKQKTMLLPNIPPIANPVVMRALTQARKVVNAIIKKYGSPVSIHIELARDLSQTFDERRKTKKEQDENRKKNETAIRQLMEYGLTLNPTGHDIVKFKLWSEQNGRCAYSLQPIEIERLLEPGYVEVDHVIPYSRSLDDSYTNKVLVLTRENREKGNRIPAEYLGVGTERWQQFETFVLTNKQFSKKKRDRLLRLHYDENEETEFKNRNLNDTRYISRFFANFIREHLKFAESDDKQKVYTVNGRVTAHLRSRWEFNKNREESDLHHAVDAVIVACTTPSDIAKVTAFYQRREQNKELAKKTEPHFPQPWPHFADELRARLSKHPKESIKALNLGNYDDQKLESLQPVFVSRMPKRSVTGAAHQETLRRYVGIDERSGKIQTVVKTKLSEIKLDASGHFPMYGKESDPRTYEAIRQRLLEHNNDPKKAFQEPLYKPKKNGEPGPVIRTVKIIDTKNQVIPLNDGKTVAYNSNIVRVDVFEKDGKYYCVPVYTMDIMKGILPNKAIEPNKPYSEWKEMTEDYTFRFSLYPNDLIRIELPREKTVKTAAGEEINVKDVFVYYKTIDSANGGLELISHDHRFSLRGVGSRTLKRFEKYQVDVLGNIYKVRGEKRVGLASSAHSKPGKTIRPLQSTRD

SEQ ID NO: 38941 - protein, 1378 aa, Streptococcus spp.
MDKKYSIGLDIGTNSVGWAVITDEYKVPSKKFKVLGNTDRHSIKKNLIGALLFDSGETAEATRLKRTARRRYTRRKNRICYLQEIFSNEMAKVDDSFFHRLEESFLVEEDKKHERHPIFGNIVDEVAYHEKYPTIYHLRKKLVDSTDKADLRLIYLALAHMIKFRGHFLIEGDLNPDNSDVDKLFIQLVQTYNQLFEENPINASGVDAKAILSARLSKSRKLENLIAQLPGEKKNGLFGNLIALSLGLTPNFKSNFDLAEDAKLQLSKDTYDDDLDNLLAQIGDQYADLFLAAKNLSDAILLSDILRVNTEITKAPLSASMIKRYDEHHQDLTLLKALVRQQLPEKYKEIFFDQSKNGYAGYIDGGASQEEFYKFIKPILEKMDGTEELLVKLKREDLLRKQRTFDNGSIPHQIHLGELHAILRRQEDFYPFLKDNREKIEKILTFRIPYYVGPLARGNSRFAWMTRKSEETITPWNFEEVVDKGASAQSFIERMTNFDKNLPNEKVLPKHSLLYEYFTVYNELTKVKYVTEGMRKPAFLSGEQKKAIVDLLFKTNRKVTVKQLKEDYFKKIECFDSVEISGVEDRFNASLGTYHDLLKIIKDKDFLDNEENEDILEDIVLTLTLFEDREMIEERLKTYAHLFDDKVMKQLKRRRYTGWGRLSRKLINGIRDKQSGKTILDFLKSDGFANRNFMQLIHDDSLTFKEDIQKAQVSGQGDSLHEHIANLAGSPAIKKGILQTVKVVDELVKVMGRHKPENIVIEMARENQTTQKGQKNSRERMKRIEEGIKELGSQILKEHPVENTQLQNEKLYLYYLQNGRDMYVDQELDINRLSDYDVDHIVPQSFLKDDSIDNKVLTRSDKNRGKSDNVPSEEVVKKMKNYWRQLLNAKLITQRKFDNLTKAERGGLSELDKAGFIKRQLVETRQITKHVAQILDSRMNTKYDENDKLIREVKVITLKSKLVSDFRKDFQFYKVREINNYHHAHDAYLNAVVGTALIKKYPKLESEFVYGDYKVYDVRKMIAKSEQEIGKATAKYFFYSNIMNFFKTEITLANGEIRKRPLIETNGETGEIVWDKGRDFATVRKVLSMPQVNIVKKTEIQTVGQNGGLFDDNPKSPLEVTPSKLVPLKKELNPKKYGGYQKPTTAYPVLLITDTKQLIPISVMNKKQFEQNPVKFLRDRGYQQVGKNDFIKLPKYTLVDIGDGIKRLWASSKEIHKGNQLVVSKKSQILLYHAHHLDSDLSNDYLQNHNQQFDVLFNEIISFSKKCKLGKEHIQKIENVYSNKKNSASIEELAESFIKLLGFTQLGATSPFNFLGVKLNQKQYKGKKDYILPCTEGTLIRQSITGLYETRVDLSKIGEDSGGSGGSKRTADGSEFES

SEQ ID NO: 38942 - protein, 1082 aa, Neisseria meningitidis
MAAFKPNSINYILGLDIGIASVGWAMVEIDEEENPIRLIDLGVRVFERAEVPKTGDSLAMARRLARSVRRLTRRRAHRLLRTRRLLKREGVLQAANFDENGLIKSLPNTPWQLRAAALDRKLTPLEWSAVLLHLIKHRGYLSQRKNEGETADKELGALLKGVAGNAHALQTGDFRTPAELALNKFEKESGHIRNQRSDYSHTFSRKDLQAELILLFEKQKEFGNPHVSGGLKEGIETLLMTQRPALSGDAVQKMLGHCTFEPAEPKAAKNTYTAERFIWLTKLNNLRILEQGSERPLTDTERATLMDEPYRKSKLTYAQARKLLGLEDTAFFKGLRYGKDNAEASTLMEMKAYHAISRALEKEGLKDKKSPLNLSPELQDEIGTAFSLFKTDEDITGRLKDRIQPEILEALLKHISFDKFVQISLKALRRIVPLMEQGKRYDEACAEIYGDHYGKKNTEEKIYLPPIPADEIRNPVVLRALSQARKVINGVVRRYGSPARIHIETAREVGKSFKDRKEIEKRQEENRKDREKAAAKFREYFPNFVGEPKSKDILKLRLYEQQHGKCLYSGKEINLGRLNEKGYVEIDHALPFSRTWDDSFNNKVLVLGSENQNKGNQTPYEYFNGKDNSREWQEFKARVETSRFPRSKKQRILLQKFDEDGFKERNLNDTRYVNRFLCQFVADRMRLTGKGKKRVFASNGQITNLLRGFWGLRKVRAENDRHHALDAVVVACSTVAMQQKITRFVRYKEMNAFDGKTIDKETGEVLHQKTHFPQPWEFFAQEVMIRVFGKPDGKPEFEEADTLEKLRTLLAEKLSSRPEAVHEYVTPLFVSRAPNRKMSGQGHMETVKSAKRLDEGVSVLRVPLTQLKLKDLEKMVNREREPKLYEALKARLEAHKDDPAKAFAEPFYKYDKAGNRTQQVKAVRVEQVQKTGVWVRNHNGIADNATMVRVDVFEKGDKYYLVPIYSWQVAKGILPDRAVVQGKDEEDWQLIDDSFNFKFSLHPNDLVEVITKKARMFGYFASCHRGTGNINIRIHDLDHKIGKNGILEGIGVKTALSFQKYQIDELGKEIRPCRLKKRPPVR

SEQ ID NO: 38943 - protein, 1375 aa, Streptococcus canis
MEKKYSIGLDIGTNSVGWAVITDDYKVPSKKFKVLGNTNRKSIKKNLMGALLFDSGETAEATRLKRTARRRYTRRKNRIRYLQEIFANEMAKLDDSFFQRLEESFLVEEDKKNERHPIFGNLADEVAYHRNYPTIYHLRKKLADSPEKADLRLIYLALAHIIKFRGHFLIEGKLNAENSDVAKLFYQLIQTYNQLFEESPLDEIEVDAKGILSARLSKSKRLEKLIAVFPNEKKNGLFGNIIALALGLTPNFKSNFDLTEDAKLQLSKDTYDDDLDELLGQIGDQYADLFSAAKNLSDAILLSDILRSNSEVTKAPLSASMVKRYDEHHQDLALLKTLVRQQFPEKYAEIFKDDTKNGYAGYVGIGIKHRKRTTKLATQEEFYKFIKPILEKMDGAEELLAKLNRDDLLRKQRTFDNGSIPHQIHLKELHAILRRQEEFYPFLKENREKIEKILTFRIPYYVGPLARGNSRFAWLTRKSEEAITPWNFEEVVDKGASAQSFIERMTNFDEQLPNKKVLPKHSLLYEYFTVYNELTKVKYVTERMRKPEFLSGEQKKAIVDLLFKTNRKVTVKQLKEDYFKKIECFDSVEIIGVEDRFNASLGTYHDLLKIIKDKDFLDNEENEDILEDIVLTLTLFEDREMIEERLKTYAHLFDDKVMKQLKRRHYTGWGRLSRKMINGIRDKQSGKTILDFLKSDGFSNRNFMQLIHDDSLTFKEEIEKAQVSGQGDSLHEQIADLAGSPAIKKGILQTVKIVDELVKVMGHKPENIVIEMARENQTTTKGLQQSRERKKRIEEGIKELESQILKENPVENTQLQNEKLYLYYLQNGRDMYVDQELDINRLSDYDVDHIVPQSFIKDDSIDNKVLTRSVENRGKSDNVPSEEVVKKMKNYWRQLLNAKLITQRKFDNLTKAERGGLSEADKAGFIKRQLVETRQITKHVARILDSRMNTKRDKNDKPIREVKVITLKSKLVSDFRKDFQLYKVRDINNYHHAHDAYLNAVVGTALIKKYPKLESEFVYGDYKVYDVRKMIAKSEQEIGKATAKRFFYSNIMNFFKTEVKLANGEIRKRPLIETNGETGEVVWNKEKDFATVRKVLAMPQVNIVKKTEVQTGGFSKESILSKRESAKLIPRKKGWDTRKYGGFGSPTVAYSILVVAKVEKGKAKKLKSVKVLVGITIMEKGSYEKDPIGFLEAKGYKDIKKELIFKLPKYSLFELENGRRRMLASATELQKANELVLPQHLVRLLYYTQNISATTGSNNLGYIEQHREEFKEIFEKIIDFSEKYILKNKVNSNLKSSFDEQFAVSDSILLSNSFVSLLKYTSFGASGGFTFLDLDVKQGRLRYQTVTEVLDATLIYQSITGLYETRTDLSQLGGD

SEQ ID NO: 38944 - protein, 1375 aa, Streptococcus canis
MEKKYSIGLDIGTNSVGWAVITDDYKVPSKKFKVLGNTNRKSIKKNLMGALLFDSGETAEATRLKRTARRRYTRRKNRIRYLQEIFANEMAKLDDSFFQRLEESFLVEEDKKNERHPIFGNLADEVAYHRNYPTIYHLRKKLADSPEKADLRLIYLALAHIIKFRGHFLIEGKLNAENSDVAKLFYQLIQTYNQLFEESPLDEIEVDAKGILSARLSKSKRLEKLIAVFPNEKKNGLFGNIIALALGLTPNFKSNFDLTEDAKLQLSKDTYDDDLDELLGQIGDQYADLFSAAKNLSDAILLSDILRSNSEVTKAPLSASMVKRYDEHHQDLALLKTLVRQQFPEKYAEIFKDDTKNGYAGYVGADKKLRKRSGKLATEEEFYKFIKPILEKMDGAEELLAKLNRDDLLRKQRTFDNGSIPHQIHLKELHAILRRQEEFYPFLKENREKIEKILTFRIPYYVGPLARGNSRFAWLTRKSEEAITPWNFEEVVDKGASAQSFIERMTNFDEQLPNKKVLPKHSLLYEYFTVYNELTKVKYVTERMRKPEFLSGEQKKAIVDLLFKTNRKVTVKQLKEDYFKKIECFDSVEIIGVEDRFNASLGTYHDLLKIIKDKDFLDNEENEDILEDIVLTLTLFEDREMIEERLKTYAHLFDDKVMKQLKRRHYTGWGRLSRKMINGIRDKQSGKTILDFLKSDGFSNANFMQLIHDDSLTFKEEIEKAQVSGQGDSLHEQIADLAGSPAIKKGILQTVKIVDELVKVMGHKPENIVIEMARENQTTTKGLQQSRERKKRIEEGIKELESQILKENPVENTQLQNEKLYLYYLQNGRDMYVDQELDINRLSDYDVDHIVPQSFIKDDSIDNKVLTRSVENRGKSDNVPSEEVVKKMKNYWRQLLNAKLITQRKFDNLTKAERGGLSEADKAGFIKRQLVETRQITKHVARILDSRMNTKRDKNDKPIREVKVITLKSKLVSDFRKDFQLYKVRDINNYHHAHDAYLNAVVGTALIKKYPKLESEFVYGDYKVYDVRKMIAKSEQEIGKATAKRFFYSNIMNFFKTEVKLANGEIRKRPLIETNGETGEVVWNKEKDFATVRKVLAMPQVNIVKKTEVQTGGFSKESILSKRESAKLIPRKKGWDTRKYGGFGSPTVAYSILVVAKVEKGKAKKLKSVKVLVGITIMEKGSYEKDPIGFLEAKGYKDIKKELIFKLPKYSLFELENGRRRMLASAKELQKANELVLPQHLVRLLYYTQNISATTGSNNLGYIEQHREEFKEIFEKIIDFSEKYILKNKVNSNLKSSFDEQFAVSDSILLSNSFVSLLKYTSFGASGGFTFLDLDVKQGRLRYQTVTEVLDATLIYQSITGLYETRTDLSQLGGD

SEQ ID NO: 38945 - protein, 1368 aa, Streptococcus pyogenes
MDKKYSIGLDIGTNSVGWAVITDEYKVPSKKFKVLGNTDRHSIKKNLIGALLFDSGETAEATRLKRTARRRYTRRKNRICYLQEIFSNEMAKVDDSFFHRLEESFLVEEDKKHERHPIFGNIVDEVAYHEKYPTIYHLRKKLVDSTDKADLRLIYLALAHMIKFRGHFLIEGDLNPDNSDVDKLFIQLVQTYNQLFEENPINASGVDAKAILSARLSKSRRLENLIAQLPGEKKNGLFGNLIALSLGLTPNFKSNFDLAEDAKLQLSKDTYDDDLDNLLAQIGDQYADLFLAAKNLSDAILLSDILRVNTEITKAPLSASMVKRYDEHHQDLTLLKALVRQQLPEKYKEIFFDQSKNGYAGYIDGGASQEEFYKFIKPILEKMDGTEELLVKLNREDLLRKQRTFDNGIIPHQIHLGELHAILRRQGDFYPFLKDNREKIEKILTFRIPYYVGPLARGNSRFAWMTRKSEETITPWNFEEVVDKGASAQSFIERMTNFDKNLPNEKVLPKHSLLYEYFTVYNELTKVKYVTEGMRKPAFLSGEQKKAIVDLLFKTNRKVTVKQLKEDYFKKIECFDSVEISGVEDRFNASLGTYHDLLKIIKDKDFLDNEENEDILEDIVLTLTLFEDREMIEERLKTYAHLFDDKVMKQLKRLRYTGWGRLSRKLINGIRDKQSGKTILDFLKSDGFANRNFMQLIHDDSLTFKEDIQKAQVSGQGDSLHEHIANLAGSPAIKKGILQTVKVVDELVKVMGGHKPENIVIEMARENQTTQKGQKNSRERMKRIEEGIKELGSQILKEHPVENTQLQNEKLYLYYLQNGRDMYVDQELDINRLSDYDVDHIVPQSFLKDDSIDNKVLTRSDKNRGKSDNVPSEEVVKKMKNYWRQLLNAKLITQRKFDNLTKAERGGLSELDKAGFIKRQLVETRQITKHVAQILDSRMNTKYDENDKLIREVKVITLKSKLVSDFRKDFQFYKVREINNYHHAHDAYLNAVVGTALIKKYPKLESEFVYGDYKVYDVRKMIAKSEQEIGKATAKYFFYSNIMNFFKTEITLANGEIRKRPLIETNGETGEIVWDKGRDFATVRKVLSMPQVNIVKKTEVQTGGFSKESILPKGNSDKLIARKKDWDPKKYGGFNSPTAAYSVLVVAKVEKGKSKKLKSVKELLGITIMERSSFEKNPIGFLEAKGYKEVKKDLIIKLPKYSLFELENGRKRMLASAGVLHKGNELALPSKYVNFLYLASHYEKLKGSPEDNEQKQLFVEQHKHYLDEIIEQISEFSKRVILADANLDKVLSAYNKHRDKPIREQAENIIHLFTLTNLGVPAAFKYFDTTIDKKRYTSTKEVLDATLIHQSITGLYETRIDLSQLGGD

SEQ ID NO: 38946 - protein, 1368 aa, Streptococcus pyogenes
MDKKYSIGLDIGTNSVGWAVITDEYKVPSKKFKVLGNTDRHSIKKNLIGALLFDSGETAEATRLKRTARRRYTRRKNRICYLQEIFSNEMAKVDDSFFHRLEESFLVEEDKKHERHPIFGNIVDEVAYHEKYPTIYHLRKKLVDSTDKADLRLIYLALAHMIKFRGHFLIEGDLNPDNSDVDKLFIQLVQTYNQLFEENPINASGVDAKAILSARLSKSRRLENLIAQLPGEKKNGLFGNLIALSLGLTPNFKSNFDLAEDAKLQLSKDTYDDDLDNLLAQIGDQYADLFLAAKNLSDAILLSDILRVNTEITKAPLSASMVKRYDEHHQDLTLLKALVRQQLPEKYKEIFFDQSKNGYAGYIDGGASQEEFYKFIKPILEKMDGTEELLVKLNREDLLRKQRTFDNGIIPHQIHLGELHAILRRQGDFYPFLKDNREKIEKILTFRIPYYVGPLARGNSRFAWMTRKSEETITPWNFEEVVDKGASAQSFIERMTNFDKNLPNEKVLPKHSLLYEYFTVYNELTKVKYVTEGMRKPAFLSGEQKKAIVDLLFKTNRKVTVKQLKEDYFKKIECFDSVEISGVEDRFNASLGTYHDLLKIIKDKDFLDNEENEDILEDIVLTLTLFEDREMIEERLKTYAHLFDDKVMKQLKRLRYTGWGRLSRKLINGIRDKQSGKTILDFLKSDGFANRNFMQLIHDDSLTFKEDIQKAQVSGQGDSLHEHIANLAGSPAIKKGILQTVKVVDELVKVMGGHKPENIVIEMARENQTTQKGQKNSRERMKRIEEGIKELGSQILKEHPVENTQLQNEKLYLYYLQNGRDMYVDQELDINRLSDYDVDHIVPQSFLKDDSIDNKVLTRSDKNRGKSDNVPSEEVVKKMKNYWRQLLNAKLITQRKFDNLTKAERGGLSELDKAGFIKRQLVETRQITKHVAQILDSRMNTKYDENDKLIREVKVITLKSKLVSDFRKDFQFYKVREINNYHHAHDAYLNAVVGTALIKKYPKLESEFVYGDYKVYDVRKMIAKSEQEIGKATAKYFFYSNIMNFFKTEITLANGEIRKRPLIETNGETGEIVWDKGRDFATVRKVLSMPQVNIVKKTEVQTGGFSKESILPKGNSDKLIARKKDWDPKKYGGFNSPTVAYSVLVVAKVEKGKSKKLKSVKELLGITIMERSSFEKNPIGFLEAKGYKEVKKDLIIKLPKYSLFELENGRKRMLASASVLHKGNELALPSKYVNFLYLASHYEKLKGSSEDNKQKQLFVEQHKHYLDEIIEQISEFSKRVILADANLDKVLSAYNKHRDKPIREQAENIIHLFTLTNLGASAAFKYFDTTIGRKLYTSTKEVLDATLIHQSITGLYETRIDLSQLGGD

SEQ ID NO: 38947 - protein, 1368 aa, Streptococcus pyogenes
MDKKYSIGLDIGTNSVGWAVITDEYKVPSKKFKVLGNTDRHSIKKNLIGALLFDSGETAEATRLKRTARRRYTRRKNRICYLQEIFSNEMAKVDDSFFHRLEESFLVEEDKKHERHPIFGNIVDEVAYHEKYPTIYHLRKKLVDSTDKADLRLIYLALAHMIKFRGHFLIEGDLNPDNSDVDKLFIQLVQTYNQLFEENPINASGVDAKAILSARLSKSRRLENLIAQLPGEKKNGLFGNLIALSLGLTPNFKSNFDLAEDAKLQLSKDTYDDDLDNLLAQIGDQYADLFLAAKNLSDAILLSDILRVNTEITKAPLSASMVKRYDEHHQDLTLLKALVRQQLPEKYKEIFFDQSKNGYAGYIDGGASQEEFYKFIKPILEKMDGTEELLVKLNREDLLRKQRTFDNGIIPHQIHLGELHAILRRQGDFYPFLKDNREKIEKILTFRIPYYVGPLARGNSRFAWMTRKSEETITPWNFEEVVDKGASAQSFIERMTNFDKNLPNEKVLPKHSLLYEYFTVYNELTKVKYVTEGMRKPAFLSGEQKKAIVDLLFKTNRKVTVKQLKEDYFKKIECFDSVEISGVEDRFNASLGTYHDLLKIIKDKDFLDNEENEDILEDIVLTLTLFEDREMIEERLKTYAHLFDDKVMKQLKRLRYTGWGRLSRKLINGIRDKQSGKTILDFLKSDGFANRNFMQLIHDDSLTFKEDIQKAQVSGQGDSLHEHIANLAGSPAIKKGILQTVKVVDELVKVMGGHKPENIVIEMARENQTTQKGQKNSRERMKRIEEGIKELGSQILKEHPVENTQLQNEKLYLYYLQNGRDMYVDQELDINRLSDYDVDHIVPQSFLKDDSIDNKVLTRSDKNRGKSDNVPSEEVVKKMKNYWRQLLNAKLITQRKFDNLTKAERGGLSELDKAGFIKRQLVETRQITKHVAQILDSRMNTKYDENDKLIREVKVITLKSKLVSDFRKDFQFYKVREINNYHHAHDAYLNAVVGTALIKKYPKLESEFVYGDYKVYDVRKMIAKSEQEIGKATAKYFFYSNIMNFFKTEITLANGEIRKRPLIETNGETGEIVWDKGRDFATVRKVLSMPQVNIVKKTEVQTGGFSKESILPKGNSDKLIARKKDWDPKKYGGFNSPTVAYSVLVVAKVEKGKSKKLKSVKELLGITIMERSSFEKNPIDFLEAKGYKEVKKDLIIKLPKYSLFELENGRKRMLASAGVLQKGNELALPSKYVNFLYLASHYEKLKGSPEDNEQKQLFVEQHKHYLDEIIEQISEFSKRVILADANLDKVLSAYNKHRDKPIREQAENIIHLFTLTNLGAPAAFKYFDTTINRKQYNTTKEVLDATLIRQSITGLYETRIDLSQLGGD

SEQ ID NO: 38948 - protein, 1368 aa, Streptococcus pyogenes
MDKKYSIGLDIGTNSVGWAVITDEYKVPSKKFKVLGNTDRHSIKKNLIGALLFDSGETAEATRLKRTARRRYTRRKNRICYLQEIFSNEMAKVDDSFFHRLEESFLVEEDKKHERHPIFGNIVDEVAYHEKYPTIYHLRKKLVDSTDKADLRLIYLALAHMIKFRGHFLIEGDLNPDNSDVDKLFIQLVQTYNQLFEENPINASGVDAKAILSARLSKSRRLENLIAQLPGEKKNGLFGNLIALSLGLTPNFKSNFDLAEDAKLQLSKDTYDDDLDNLLAQIGDQYADLFLAAKNLSDAILLSDILRVNTEITKAPLSASMIKRYDEHHQDLTLLKALVRQQLPEKYKEIFFDQSKNGYAGYIDGGASQEEFYKFIKPILEKMDGTEELLVKLNREDLLRKQRTFDNGSIPHQIHLGELHAILRRQEDFYPFLKDNREKIEKILTFRIPYYVGPLARGNSRFAWMTRKSEETITPWNFEEVVDKGASAQSFIERMTNFDKNLPNEKVLPKHSLLYEYFTVYNELTKVKYVTEGMRKPAFLSGEQKKAIVDLLFKTNRKVTVKQLKEDYFKKIECFDSVEISGVEDRFNASLGTYHDLLKIIKDKDFLDNEENEDILEDIVLTLTLFEDREMIEERLKTYAHLFDDKVMKQLKRRRYTGWGRLSRKLINGIRDKQSGKTILDFLKSDGFANRNFMQLIHDDSLTFKEDIQKAQVSGQGDSLHEHIANLAGSPAIKKGILQTVKVVDELVKVMGRHKPENIVIEMARENQTTQKGQKNSRERMKRIEEGIKELGSQILKEHPVENTQLQNEKLYLYYLQNGRDMYVDQELDINRLSDYDVDHIVPQSFLKDDSIDNKVLTRSDKNRGKSDNVPSEEVVKKMKNYWRQLLNAKLITQRKFDNLTKAERGGLSELDKAGFIKRQLVETRQITKHVAQILDSRMNTKYDENDKLIREVKVITLKSKLVSDFRKDFQFYKVREINNYHHAHDAYLNAVVGTALIKKYPKLESEFVYGDYKVYDVRKMIAKSEQEIGKATAKYFFYSNIMNFFKTEITLANGEIRKRPLIETNGETGEIVWDKGRDFATVRKVLSMPQVNIVKKTEVQTGGFSKESILPKRNSDKLIARKKDWDPKKYGGFDSPTVAYSVLVVAKVEKGKSKKLKSVKELLGITIMERSSFEKNPIDFLEAKGYKEVKKDLIIKLPKYSLFELENGRKRMLASARELQKGNELALPSKYVNFLYLASHYEKLKGSPEDNEQKQLFVEQHKHYLDEIIEQISEFSKRVILADAQLDKVLSAYNKHRDKPIREQAENIIHLFTLTNLGAPAAFKYFDTTFKQKQYRSTKEVLDATLIHQSITGLYETRIDLSQLGGD

SEQ ID NO: 38949 - protein, 1368 aa, Streptococcus pyogenes
MDKKYSIGLDIGTNSVGWAVITDEYKVPSKKFKVLGNTDRHSIKKNLIGALLFDSGETAEATRLKRTARRRYTRRKNRICYLQEIFSNEMAKVDDSFFHRLEESFLVEEDKKHERHPIFGNIVDEVAYHEKYPTIYHLRKKLVDSTDKADLRLIYLALAHMIKFRGHFLIEGDLNPDNSDVDKLFIQLVQTYNQLFEENPINASGVDAKAILSARLSKSRRLENLIAQLPGEKKNGLFGNLIALSLGLTPNFKSNFDLAEDAKLQLSKDTYDDDLDNLLAQIGDQYADLFLAAKNLSDAILLSDILRVNTEITKAPLSASMIKRYDEHHQDLTLLKALVRQQLPEKYKEIFFDQSKNGYAGYIDGGASQEEFYKFIKPILEKMDGTEELLVKLNREDLLRKQRTFDNGSIPHQIHLGELHAILRRQEDFYPFLKDNREKIEKILTFRIPYYVGPLARGNSRFAWMTRKSEETITPWNFEEVVDKGASAQSFIERMTNFDKNLPNEKVLPKHSLLYEYFTVYNELTKVKYVTEGMRKPAFLSGEQKKAIVDLLFKTNRKVTVKQLKEDYFKKIECFDSVEISGVEDRFNASLGTYHDLLKIIKDKDFLDNEENEDILEDIVLTLTLFEDREMIEERLKTYAHLFDDKVMKQLKRRRYTGWGRLSRKLINGIRDKQSGKTILDFLKSDGFANRNFMQLIHDDSLTFKEDIQKAQVSGQGDSLHEHIANLAGSPAIKKGILQTVKVVDELVKVMGRHKPENIVIEMARENQTTQKGQKNSRERMKRIEEGIKELGSQILKEHPVENTQLQNEKLYLYYLQNGRDMYVDQELDINRLSDYDVDHIVPQSFLKDDSIDNKVLTRSDKNRGKSDNVPSEEVVKKMKNYWRQLLNAKLITQRKFDNLTKAERGGLSELDKAGFIKRQLVETRQITKHVAQILDSRMNTKYDENDKLIREVKVITLKSKLVSDFRKDFQFYKVREINNYHHAHDAYLNAVVGTALIKKYPKLESEFVYGDYKVYDVRKMIAKSEQEIGKATAKYFFYSNIMNFFKTEITLANGEIRKRPLIETNGETGEIVWDKGRDFATVRKVLSMPQVNIVKKTEVQTGGFSKESILPKRNSDKLIARKKDWDPKKYGGFLWPTVAYSVLVVAKVEKGKSKKLKSVKELLGITIMERSSFEKNPIDFLEAKGYKEVKKDLIIKLPKYSLFELENGRKRMLASAKQLQKGNELALPSKYVNFLYLASHYEKLKGSPEDNEQKQLFVEQHKHYLDEIIEQISEFSKRVILADANLDKVLSAYNKHRDKPIREQAENIIHLFTLTNLGAPAAFKYFDTTIDRKQYRSTKEVLDATLIHQSITGLYETRIDLSQLGGD

SEQ ID NO: 38950 - protein, 1368 aa, Streptococcus pyogenes
MDKKYSIGLDIGTNSVGWAVITDEYKVPSKKFKVLGNTDRHSIKKNLIGALLFDSGETAEATRLKRTARRRYTRRKNRICYLQEIFSNEMAKVDDSFFHRLEESFLVEEDKKHERHPIFGNIVDEVAYHEKYPTIYHLRKKLVDSTDKADLRLIYLALAHMIKFRGHFLIEGDLNPDNSDVDKLFIQLVQTYNQLFEENPINASGVDAKAILSARLSKSRRLENLIAQLPGEKKNGLFGNLIALSLGLTPNFKSNFDLAEDAKLQLSKDTYDDDLDNLLAQIGDQYADLFLAAKNLSDAILLSDILRVNTEITKAPLSASMIKRYDEHHQDLTLLKALVRQQLPEKYKEIFFDQSKNGYAGYIDGGASQEEFYKFIKPILEKMDGTEELLVKLNREDLLRKQRTFDNGSIPHQIHLGELHAILRRQEDFYPFLKDNREKIEKILTFRIPYYVGPLARGNSRFAWMTRKSEETITPWNFEEVVDKGASAQSFIERMTNFDKNLPNEKVLPKHSLLYEYFTVYNELTKVKYVTEGMRKPAFLSGEQKKAIVDLLFKTNRKVTVKQLKEDYFKKIECFDSVEISGVEDRFNASLGTYHDLLKIIKDKDFLDNEENEDILEDIVLTLTLFEDREMIEERLKTYAHLFDDKVMKQLKRRRYTGWGRLSRKLINGIRDKQSGKTILDFLKSDGFANRNFMQLIHDDSLTFKEDIQKAQVSGQGDSLHEHIANLAGSPAIKKGILQTVKVVDELVKVMGRHKPENIVIEMARENQTTQKGQKNSRERMKRIEEGIKELGSQILKEHPVENTQLQNEKLYLYYLQNGRDMYVDQELDINRLSDYDVDHIVPQSFLKDDSIDNKVLTRSDKNRGKSDNVPSEEVVKKMKNYWRQLLNAKLITQRKFDNLTKAERGGLSELDKAGFIKRQLVETRQITKHVAQILDSRMNTKYDENDKLIREVKVITLKSKLVSDFRKDFQFYKVREINNYHHAHDAYLNAVVGTALIKKYPKLESEFVYGDYKVYDVRKMIAKSEQEIGKATAKYFFYSNIMNFFKTEITLANGEIRKRPLIETNGETGEIVWDKGRDFATVRKVLSMPQVNIVKKTEVQTGGFSKESILPKRNSDKLIARKKDWDPKKYGGFVSPTVAYSVLVVAKVEKGKSKKLKSVKELLGITIMERSSFEKNPIDFLEAKGYKEVKKDLIIKLPKYSLFELENGRKRMLASAGELQKGNELALPSKYVNFLYLASHYEKLKGSPEDNEQKQLFVEQHKHYLDEIIEQISEFSKRVILADANLDKVLSAYNKHRDKPIREQAENIIHLFTLTNLGAPAAFKYFDTTIDRKQYRSTKEVLDATLIHQSITGLYETRIDLSQLGGD

SEQ ID NO: 38951 - protein, 1368 aa, Streptococcus pyogenes
MDKKYSIGLDIGTNSVGWAVITDEYKVPSKKFKVLGNTDRHSIKKNLIGALLFDSGETAEATRLKRTARRRYTRRKNRICYLQEIFSNEMAKVDDSFFHRLEESFLVEEDKKHERHPIFGNIVDEVAYHEKYPTIYHLRKKLVDSTDKADLRLIYLALAHMIKFRGHFLIEGDLNPDNSDVDKLFIQLVQTYNQLFEENPINASGVDAKAILSARLSKSRRLENLIAQLPGEKKNGLFGNLIALSLGLTPNFKSNFDLAEDAKLQLSKDTYDDDLDNLLAQIGDQYADLFLAAKNLSDAILLSDILRVNTEITKAPLSASMIKRYDEHHQDLTLLKALVRQQLPEKYKEIFFDQSKNGYAGYIDGGASQEEFYKFIKPILEKMDGTEELLVKLNREDLLRKQRTFDNGSIPHQIHLGELHAILRRQEDFYPFLKDNREKIEKILTFRIPYYVGPLARGNSRFAWMTRKSEETITPWNFEEVVDKGASAQSFIERMTNFDKNLPNEKVLPKHSLLYEYFTVYNELTKVKYVTEGMRKPAFLSGEQKKAIVDLLFKTNRKVTVKQLKEDYFKKIECFDSVEISGVEDRFNASLGTYHDLLKIIKDKDFLDNEENEDILEDIVLTLTLFEDREMIEERLKTYAHLFDDKVMKQLKRRRYTGWGRLSRKLINGIRDKQSGKTILDFLKSDGFANRNFMQLIHDDSLTFKEDIQKAQVSGQGDSLHEHIANLAGSPAIKKGILQTVKVVDELVKVMGRHKPENIVIEMARENQTTQKGQKNSRERMKRIEEGIKELGSQILKEHPVENTQLQNEKLYLYYLQNGRDMYVDQELDINRLSDYDVDHIVPQSFLKDDSIDNKVLTRSDKNRGKSDNVPSEEVVKKMKNYWRQLLNAKLITQRKFDNLTKAERGGLSELDKAGFIKRQLVETRQITKHVAQILDSRMNTKYDENDKLIREVKVITLKSKLVSDFRKDFQFYKVREINNYHHAHDAYLNAVVGTALIKKYPKLESEFVYGDYKVYDVRKMIAKSEQEIGKATAKYFFYSNIMNFFKTEITLANGEIRKRPLIETNGETGEIVWDKGRDFATVRKVLSMPQVNIVKKTEVQTGGFSKESILPKRNSDKLIARKKDWDPKKYGGFVSPTVAYSVLVVAKVEKGKSKKLKSVKELLGITIMERSSFEKNPIDFLEAKGYKEVKKDLIIKLPKYSLFELENGRKRMLASARELQKGNELALPSKYVNFLYLASHYEKLKGSPEDNEQKQLFVEQHKHYLDEIIEQISEFSKRVILADANLDKVLSAYNKHRDKPIREQAENIIHLFTLTNLGAPAAFKYFDTTIDRKEYRSTKEVLDATLIHQSITGLYETRIDLSQLGGD

SEQ ID NO: 38952 - protein, 1368 aa, Streptococcus pyogenes
MDKKYSIGLDIGTNSVGWAVITDEYKVPSKKFKVLGNTDRHSIKKNLIGALLFDSGETAEATRLKRTARRRYTRRKNRICYLQEIFSNEMAKVDDSFFHRLEESFLVEEDKKHERHPIFGNIVDEVAYHEKYPTIYHLRKKLVDSTDKADLRLIYLALAHMIKFRGHFLIEGDLNPDNSDVDKLFIQLVQTYNQLFEENPINASGVDAKAILSARLSKSRRLENLIAQLPGEKKNGLFGNLIALSLGLTPNFKSNFDLAEDTKLQLSKDTYDDDLDNLLAQIGDQYADLFLAAKNLSDAILLSDILRVNTEITKAPLSASMIKLYDEHHQDLTLLKALVRQQLPEKYKEIFFDQSKNGYAGYIDGGASQEEFYKFIKPILEKMDGTEELLVKLNREDLLRKQRTFDNGIIPHQIHLGELHAILRRQEDFYPFLKDNREKIEKILTFRIPYYVGPLARGNSRFAWMTRKSEETITPWNFEKVVDKGASAQSFIERMTNFDKNLPNEKVLPKHSLLYEYFTVYNELTKVKYVTEGMRKPAFLSGDQKKAIVDLLFKTNRKVTVKQLKEDYFKKIECFDSVEISGVEDRFNASLGTYHDLLKIIKDKDFLDNEENEDILEDIVLTLTLFEDREMIEERLKTYAHLFDDKVMKQLKRRRYTGWGRLSRKLINGIRDKQSGKTILDFLKSDGFANRNFIQLIHDDSLTFKEDIQKAQVSGQGDSLHEHIANLAGSPAIKKGILQTVKVVDELVKVMGRHKPENIVIEMARENQTTQKGQKNSRERMKRIEEGIKELGSQILKEHPVENTQLQNEKLYLYYLQNGRDMYVDQELDINRLSDYDVDHIVPQSFLKDDSIDNKVLTRSDKNRGKSDNVPSEEVVKKMKNYWRQLLNAKLITQRKFDNLTKAERGGLSELDKAGFIKRQLVETRQITKHVAQILDSRMNTKYDENDKLIREVKVITLKSKLVSDFRKDFQFYKVREINNYHHAHDAYLNAVVGTALIKKYPKLESEFVYGDYKVYDVRKMIAKSEQEIGKATAKYFFYSNIMNFFKTEITLANGEIRKRPLIETNGETGEIVWDKGRDFATVRKVLSMPQVNIVKKTEVQTGGFSKESILPKRNSDKLIARKKDWDPKKYGGFDSPTVAYSVLVVAKVEKGKSKKLKSVKELLGITIMERSSFEKNPIDFLEAKGYKEVKKDLIIKLPKYSLFELENGRKRMLASAGVLQKGNELALPSKYVNFLYLASHYEKLKGSPEDNEQKQLFVEQHKHYLDEIIEQISEFSKRVILADANLDKVLSAYNKHRDKPIREQAENIIHLFTLTNLGAPAAFKYFDTTIDRKRYTSTKEVLDATLIHQSITGLYETRIDLSQLGGD

SEQ ID NO: 38953 - protein, 1368 aa, Streptococcus pyogenes
MDKKYSIGLDIGTNSVGWAVITDEYKVPSKKFKVLGNTDRHSIKKNLIGALLFDSGETAEATRLKRTARRRYTRRKNRICYLQEIFSNEMAKVDDSFFHRLEESFLVEEDKKHERHPIFGNIVDEVAYHEKYPTIYHLRKKLVDSTDKADLRLIYLALAHMIKFRGHFLIEGDLNPDNSDVDKLFIQLVQTYNQLFEENPINASGVDAKAILSARLSKSRRLENLIAQLPGEKKNGLFGNLIALSLGLTPNFKSNFDLAEDTKLQLSKDTYDDDLDNLLAQIGDQYADLFLAAKNLSDAILLSDILRVNTEITKAPLSASMIKLYDEHHQDLTLLKALVRQQLPEKYKEIFFDQSKNGYAGYIDGGASQEEFYKFIKPILEKMDGTEELLVKLNREDLLRKQRTFDNGIIPHQIHLGELHAILRRQEDFYPFLKDNREKIEKILTFRIPYYVGPLARGNSRFAWMTRKSEETITPWNFEKVVDKGASAQSFIERMTNFDKNLPNEKVLPKHSLLYEYFTVYNELTKVKYVTEGMRKPAFLSGDQKKAIVDLLFKTNRKVTVKQLKEDYFKKIECFDSVEISGVEDRFNASLGTYHDLLKIIKDKDFLDNEENEDILEDIVLTLTLFEDREMIEERLKTYAHLFDDKVMKQLKRRRYTGWGRLSRKLINGIRDKQSGKTILDFLKSDGFANRNFIQLIHDDSLTFKEDIQKAQVSGQGDSLHEHIANLAGSPAIKKGILQTVKVVDELVKVMGRHKPENIVIEMARENQTTQKGQKNSRERMKRIEEGIKELGSQILKEHPVENTQLQNEKLYLYYLQNGRDMYVDQELDINRLSDYDVDHIVPQSFLKDDSIDNKVLTRSDKNRGKSDNVPSEEVVKKMKNYWRQLLNAKLITQRKFDNLTKAERGGLSELDKAGFIKRQLVETRQITKHVAQILDSRMNTKYDENDKLIREVKVITLKSKLVSDFRKDFQFYKVREINNYHHAHDAYLNAVVGTALIKKYPKLESEFVYGDYKVYDVRKMIAKSEQEIGKATAKYFFYSNIMNFFKTEITLANGEIRKRPLIETNGETGEIVWDKGRDFATVRKVLSMPQVNIVKKTEVQTGGFSKESIRPKRNSDKLIARKKDWDPKKYGGFVSPTVAYSVLVVAKVEKGKSKKLKSVKELLGITIMERSSFEKNPIDFLEAKGYKEVKKDLIIKLPKYSLFELENGRKRMLASARFLQKGNELALPSKYVNFLYLASHYEKLKGSPEDNEQKQLFVEQHKHYLDEIIEQISEFSKRVILADANLDKVLSAYNKHRDKPIREQAENIIHLFTLTNLGAPRAFKYFDTTIDRKVYRSTKEVLDATLIHQSITGLYETRIDLSQLGGD

SEQ ID NO: 38954 - protein, 1122 aa, Streptococcus thermophilus
MSDLVLGLDIGIGSVGVGILNKVTGEIIHKNSRIFPAAQAENNLVRRTNRQGRRLARRKKHRRVRLNRLFEESGLITDFTKISINLNPYQLRVKGLTDELSNEELFIALKNMVKHRGISYLDDASDDGNSSVGDYAQIVKENSKQLETKTPGQIQLERYQTYGQLRGDFTVEKDGKKHRLINVFPTSAYRSEALRILQTQQEFNPQITDEFINRYLEILTGKRKYYHGPGNEKSRTDYGRYRTSGETLDNIFGILIGKCTFYPDEFRAAKASYTAQEFNLLNDLNNLTVPTETKKLSKEQKNQIINYVKNEKAMGPAKLFKYIAKLLSCDVADIKGYRIDKSGKAEIHTFEAYRKMKTLETLDIEQMDRETLDKLAYVLTLNTEREGIQEALEHEFADGSFSQKQVDELVQFRKANSSIFGKGWHNFSVKLMMELIPELYETSEEQMTILTRLGKQKTTSSSNKTKYIDEKLLTEEIYNPVVAKSVRQAIKIVNAAIKEYGDFDNIVIEMARETNEDDEKKAIQKIQKANKDEKDAAMLKAANQYNGKAELPHSVFHGHKQLATKIRLWHQQGERCLYTGKTISIHDLINNSNQFEVDHILPLSITFDDSLANKVLVYATANQEKGQRTPYQALDSMDDAWSFRELKAFVRESKTLSNKKKEYLLTEEDISKFDVRKKFIERNLVDTRYASRVVLNALQEHFRAHKIDTKVSVVRGQFTSQLRRHWGIEKTRDTYHHHAVDALIIAASSQLNLWKKQKNTLVSYSEEQLLDIETGELISDDEYKESVFKAPYQHFVDTLKSKEFEDSILFSYQVDSKFNRKISDATIYATRQAKVGKDKKDETYVLGKIKDIYTQDGYDAFMKIYKKDKSKFLMYRHDPQTFEKVIEPILENYPNKQMNEKGKEVPCNPFLKYKEEHGYIRKYSKKGNGPEIKSLKYYDSKLLGNPIDITPENSKNKVVLQSLKPWRTDVYFNKATGKYEILGLKYADLQFEKGTGTYKISQEKYNDIKKKEGVDSDSEFKFTLYKNDLLLVKDTETKEQQLFRFLSRTLPKQKHYVELKPYDKQKFEGGEALIKVLGNVANGGQCIKGLAKSNISIYKVRTDVLGNQHIIKNEGDKPKLDF

SEQ ID NO: 38955 - protein, 1122 aa, Streptococcus thermophilus
MSDLVLGLDIGIGSVGVGILNKVTGEIIHKNSRIFPAAQAENNLVRRTNRQGRRLARRKKHRRVRLNRLFEESGLITDFTKISINLNPYQLRVKGLTDELSNEELFIALKNMVKHRGISYLDDASDDGNSSVGDYAQIVKENSKQLETKTPGQIQLERYQTYGQLRGDFTVEKDGKKHRLINVFPTSAYRSEALRILQTQQEFNPQITDEFINRYLEILTGKRKYYHGPGNEKSRTDYGRYRTSGETLDNIFGILIGKCTFYPDEFRAAKASYTAQEFNLLNDLNNLTVPTETKKLSKEQKNQIINYVKNEKAMGPAKLFKYIAKLLSCDVADIKGYRIDKSGKAEIHTFEAYRKMKTLETLDIEQMDRETLDKLAYVLTLNTEREGIQEALEHEFADGSFSQKQVDELVQFRKANSSIFGKGWHNFSVKLMMELIPELYETSEEQMTILTRLGKQKTTSSSNKTKYIDEKLLTEEIYNPVVAKSVRQAIKIVNAAIKEYGDFDNIVIEMARETNEDDEKKAIQKIQKANKDEKDAAMLKAANQYNGKAELPHSVFHGHKQLATKIRLWHQQGERCLYTGKTISIHDLINNSNQFEVDHILPLSITFDDSLANKVLVYATANQEKGQRTPYQALDSMDDAWSFRELKAFVRESKTLSNKKKEYLLTEEDISKFDVRKKFIERNLVDTRYASRVVLNALQEHFRAHKIDTKVSVVRGQFTSQLRRHWGIEKTRDTYHHHAVDALIIAASSQLNLWKKQKNTLVSYSEEQLLDIETGELISDDEYKESVFKAPYQHFVDTLKSKEFEDSILFSYQVDSKFNRKISDATIYATRQAKVGKDKKDETYVLGKIKDIYTQDGYDAFMKIYKKDKSKFLMYRHDPQTFEKVIEPILENYPNKQMNEKGKEVPCNPFLKYKEEHGYIRKYSKKGNGPEIKSLKYYDSKLLGNPIDITPENSKNKVVLQSLKPWRTDVYFNKNTGKYEILGLKYADLQFEKKTGTYKISQEKYNGIMKEEGVDSDSEFKFTLYKNDLLLVKDTETKEQQLFRFLSRTMPNVKYYVELKPYSKDKFEKNESLIEILGSADKSGRCIKGLGKSNISIYKVRTDVLGNQHIIKNEGDKPKLDF

SEQ ID NO: 38956 - protein, 1120 aa, Streptococcus thermophilus
MSDLVLGLDIGIGSVGVGILNKVTGEIIHKNSRIFPAAQAENNLVRRTNRQGRRLARRKKHRRVRLNRLFEESGLITDFTKISINLNPYQLRVKGLTDELSNEELFIALKNMVKHRGISYLDDASDDGNSSVGDYAQIVKENSKQLETKTPGQIQLERYQTYGQLRGDFTVEKDGKKHRLINVFPTSAYRSEALRILQTQQEFNPQITDEFINRYLEILTGKRKYYHGPGNEKSRTDYGRYRTSGETLDNIFGILIGKCTFYPDEFRAAKASYTAQEFNLLNDLNNLTVPTETKKLSKEQKNQIINYVKNEKAMGPAKLFKYIAKLLSCDVADIKGYRIDKSGKAEIHTFEAYRKMKTLETLDIEQMDRETLDKLAYVLTLNTEREGIQEALEHEFADGSFSQKQVDELVQFRKANSSIFGKGWHNFSVKLMMELIPELYETSEEQMTILTRLGKQKTTSSSNKTKYIDEKLLTEEIYNPVVAKSVRQAIKIVNAAIKEYGDFDNIVIEMARETNEDDEKKAIQKIQKANKDEKDAAMLKAANQYNGKAELPHSVFHGHKQLATKIRLWHQQGERCLYTGKTISIHDLINNSNQFEVDHILPLSITFDDSLANKVLVYATANQEKGQRTPYQALDSMDDAWSFRELKAFVRESKTLSNKKKEYLLTEEDISKFDVRKKFIERNLVDTRYASRVVLNALQEHFRAHKIDTKVSVVRGQFTSQLRRHWGIEKTRDTYHHHAVDALIIAASSQLNLWKKQKNTLVSYSEDQLLDIETGELISDDEYKESVFKAPYQHFVDTLKSKEFEDSILFSYQVDSKFNRKISDATIYATRQAKVGKDKADETYVLGKIKDIYTQDGYDAFMKIYKKDKSKFLMYRHDPQTFEKVIEPILENYPNKQINEKGKEVPCNPFLKYKEEHGYIRKYSKKGNGPEIKSLKYYDSKLGNHIDITPKDSNNKVVLQSLKPWRTDVYFNKNTGKYEILGLKYSDMQFEKGTGKYSISKEQYENIKVREGVDENSEFKFTLYKNDLLLLKDSENGEQILLRFTSRNDTSKHYVELKPYNRQKFEGSEYLIKSLGTVAKGGQCIKGLGKSNISIYKVRTDVLGNQHIIKNEGDKPKLDF

SEQ ID NO: 38957 - protein, 1120 aa, Streptococcus thermophilus
MSDLVLGLDIGIGSVGVGILNKVTGEIIHKNSRIFPAAQAENNLVRRTNRQGRRLARRKKHRRVRLNRLFEESGLITDFTKISINLNPYQLRVKGLTDELSNEELFIALKNMVKHRGISYLDDASDDGNSSVGDYAQIVKENSKQLETKTPGQIQLERYQTYGQLRGDFTVEKDGKKHRLINVFPTSAYRSEALRILQTQQEFNPQITDEFINRYLEILTGKRKYYHGPGNEKSRTDYGRYRTSGETLDNIFGILIGKCTFYPDEFRAAKASYTAQEFNLLNDLNNLTVPTETKKLSKEQKNQIINYVKNEKAMGPAKLFKYIAKLLSCDVADIKGYRIDKSGKAEIHTFEAYRKMKTLETLDIEQMDRETLDKLAYVLTLNTEREGIQEALEHEFADGSFSQKQVDELVQFRKANSSIFGKGWHNFSVKLMMELIPELYETSEEQMTILTRLGKQKTTSSSNKTKYIDEKLLTEEIYNPVVAKSVRQAIKIVNAAIKEYGDFDNIVIEMARETNEDDEKKAIQKIQKANKDEKDAAMLKAANQYNGKAELPHSVFHGHKQLATKIRLWHQQGERCLYTGKTISIHDLINNSNQFEVDHILPLSITFDDSLANKVLVYATANQEKGQRTPYQALDSMDDAWSFRELKAFVRESKTLSNKKKEYLLTEEDISKFDVRKKFIERNLVDTRYASRVVLNALQEHFRAHKIDTKVSVVRGQFTSQLRRHWGIEKTRDTYHHHAVDALIIAASSQLNLWKKQKNTLVSYSEDQLLDIETGELISDDEYKESVFKAPYQHFVDTLKSKEFEDSILFSYQVDSKFNRKISDATIYATRQAKVGKDKADETYVLGKIKDIYTQDGYDAFMKIYKKDKSKFLMYRHDPQTFEKVIEPILENYPNKQINEKGKEVPCNPFLKYKEEHGYIRKYSKKGNGPEIKSLKYYDSKLGNHIDITPKDSNNKVVLQSLKPWRTDVYFNKNTGKYEILGLKYSDMQFEKGTGKYSISKEQYENIKVREGVDENSEFKFTLYKNDLLLLKDSENGEQILLRFTSRNDTSKHYVELKPYNRQKFEGSEYLIKSLGTVVKGGRCIKGLGKSNISIYKVRTDVLGNQHIIKNEGDKPKLDF

SEQ ID NO: 38958 - protein, 16 aa, Artificial Sequence
  Description of Artificial Sequence: Synthetic peptide
SGSETPGTSESATPES

SEQ ID NO: 38959 - protein, 4 aa, Artificial Sequence
  Description of Artificial Sequence: Synthetic peptide
  See specification as filed for detailed description of substitutions and preferred embodiments
SGGS

SEQ ID NO: 38960 - protein, 4 aa, Artificial Sequence
  Description of Artificial Sequence: Synthetic peptide
  See specification as filed for detailed description of substitutions and preferred embodiments
GGGS

SEQ ID NO: 38961 - protein, 5 aa, Artificial Sequence
  Description of Artificial Sequence: Synthetic peptide
  See specification as filed for detailed description of substitutions and preferred embodiments
GGGGS

SEQ ID NO: 38962 - protein, 5 aa, Artificial Sequence
  Description of Artificial Sequence: Synthetic peptide
  See specification as filed for detailed description of substitutions and preferred embodiments
EAAAK

SEQ ID NO: 38963 - DNA, 76 bp, Artificial Sequence
  Description of Artificial Sequence: Synthetic oligonucleotide
gttttagagctagaaatagcaagttaaaataaggctagtccgttatcaacttgaaaaagtgggaccgagtcggtcc

SEQ ID NO: 38964 - DNA, 306 bp, Artificial Sequence
  Description of Artificial Sequence: Synthetic polynucleotide
tgcctgtcatacgaaaccgagatactgacagtagaatatggccttctgccaatcgggaagattgtggagaaacggatagaatgcacagtttactctgtcgataacaatggtaacatttatactcagccagttgcccagtggcacgaccggggagagcaggaagtattcgaatactgtctggaggatggaagtctcattagggccactaaggaccacaaatttatgacagtcgatggccagatgctgcctatagacgaaatctttgagcgagagttggacctcatgcgagttgacaaccttcctaat

SEQ ID NO: 38965 - protein, 102 aa, Artificial Sequence
  Description of Artificial Sequence: Synthetic polypeptide
CLSYETEILTVEYGLLPIGKIVEKRIECTVYSVDNNGNIYTQPVAQWHDRGEQEVFEYCLEDGSLIRATKDHKFMTVDGQMLPIDEIFERELDLMRVDNLPN

SEQ ID NO: 38966 - DNA, 108 bp, Artificial Sequence
  Description of Artificial Sequence: Synthetic polynucleotide
atgatcaagatagctacaaggaagtatcttggcaaacaaaacgtttatgatattggagtcgaaagagatcacaactttgctctgaagaacggattcatagcttctaat

SEQ ID NO: 38967 - protein, 36 aa, Artificial Sequence
  Description of Artificial Sequence: Synthetic polypeptide
MIKIATRKYLGKQNVYDIGVERDHNFALKNGFIASN

SEQ ID NO: 38968 - DNA, 303 bp, Artificial Sequence
  Description of Artificial Sequence: Synthetic polynucleotide
tgcctgtcttatgataccgagatacttaccgttgaatatggcttcttgcctattggaaagattgtcgaagagagaattgaatgcacagtatatactgtagacaagaatggtttcgtttacacacagcccattgctcaatggcacaatcgcggcgaacaagaagtatttgagtactgtctcgaggatggaagcatcatacgagcaactaaagatcataaattcatgaccactgacgggcagatgttgccaatagatgagatattcgagcggggcttggatctcaaacaagtggatggattgcca

SEQ ID NO: 38969 - protein, 101 aa, Artificial Sequence
  Description of Artificial Sequence: Synthetic polypeptide
CLSYDTEILTVEYGFLPIGKIVEERIECTVYTVDKNGFVYTQPIAQWHNRGEQEVFEYCLEDGSIIRATKDHKFMTTDGQMLPIDEIFERGLDLKQVDGLP

SEQ ID NO: 38970 - DNA, 159 bp, Artificial Sequence
  Description of Artificial Sequence: Synthetic polynucleotide
atgaagaggactgccgatggatcagagtttgaatctcccaagaagaagaggaaagtaaagataatatctcgaaaaagtcttggtacccaaaatgtctatgatattggagtggagaaagatcacaacttccttctcaagaacggtctcgtagccagcaac

SEQ ID NO: 38971 - protein, 53 aa, Artificial Sequence
  Description of Artificial Sequence: Synthetic polypeptide
MKRTADGSEFESPKKKRKVKIISRKSLGTQNVYDIGVEKDHNFLLKNGLVASN

SEQ ID NO: 38972 - DNA, 250 bp, Homo sapiens
ccggtcccccccgccgggtccgcccccggggccgcggttccgcgcggcgcctcgcctcggccggcgcctagcagccgacttagaactggtgcggaccaggggaatccgactgtttaattaaaacaaagcatcgcgaaggcccgcggcgggtgttgacgcgatgtgatttctgcccagtgctctgaatgtcaaagtgaagaaattcaatgaagcgcgggtaaacggcgggagtaactatgactctcttaag

SEQ ID NO: 38973 - DNA, 250 bp, Homo sapiens
gcggttccgcgcggcgcctcgcctcggccggcgcctagcagccgacttagaactggtgcggaccaggggaatccgactgtttaattaaaacaaagcatcgcgaaggcccgcggcgggtgttgacgcgatgtgatttctgcccagtgctctgaatgtcaaagtgaagaaattcaatgaagcgcgggtaaacggcgggagtaactatgactctcttaaggtagccaaatgcctcgtcatctaattagtgacg

SEQ ID NO: 38974 - DNA, 250 bp, Homo sapiens
tcccccccgccgggtccgcccccggggccgcggttccgcgcggcgcctcgcctcggccggcgcctagcagccgacttagaactggtgcggaccaggggaatccgactgtttaattaaaacaaagcatcgcgaaggcccgcggcgggtgttgacgcgatgtgatttctgcccagtgctctgaatgtcaaagtgaagaaattcaatgaagcgcgggtaaacggcgggagtaactatgactctcttaaggtag

SEQ ID NO: 38975 - DNA, 250 bp, Homo sapiens
cggcgcgctcgccggccgaggtgggatcccgaggcctctccagtccgccgagggcgcaccaccggcccgtctcgcccgccgcgccggggaggtggagcacgagcgcacgtgttaggacccgaaagatggtgaactatgcctgggcagggcgaagccagaggaaactctggtggaggtccgtagcggtcctgacgtgcaaatcggtcgtccgacctgggtataggggcgaaagactaatcgaaccatctag

SEQ ID NO: 38976 - DNA, 250 bp, Homo sapiens
gcattcgtattgcgccgctagaggtgaaattcttggaccggcgcaagacggaccagagcgaaagcatttgccaagaatgttttcattaatcaagaacgaaagtcggaggttcgaagacgatcagataccgtcgtagttccgaccataaacgatgccgaccggcgatgcggcggcgttattcccatgacccgccgggcagcttccgggaaaccaaagtctttgggttccggggggagtatggttgcaaagc

SEQ ID NO: 38977 - DNA, 250 bp, Homo sapiens
tagcagccgacttagaactggtgcggaccaggggaatccgactgtttaattaaaacaaagcatcgcgaaggcccgcggcgggtgttgacgcgatgtgatttctgcccagtgctctgaatgtcaaagtgaagaaattcaatgaagcgcgggtaaacggcgggagtaactatgactctcttaaggtagccaaatgcctcgtcatctaattagtgacgcgcatgaatggatgaacgagattcccactgtccct

SEQ ID NO: 38978 - DNA, 250 bp, Homo sapiens
ccccccgccgggtccgcccccggggccgcggttccgcgcggcgcctcgcctcggccggcgcctagcagccgacttagaactggtgcggaccaggggaatccgactgtttaattaaaacaaagcatcgcgaaggcccgcggcgggtgttgacgcgatgtgatttctgcccagtgctctgaatgtcaaagtgaagaaattcaatgaagcgcgggtaaacggcgggagtaactatgactctcttaaggtagcc

SEQ ID NO: 38979 - DNA, 250 bp, Homo sapiens
gcgcaagacggaccagagcgaaagcatttgccaagaatgttttcattaatcaagaacgaaagtcggaggttcgaagacgatcagataccgtcgtagttccgaccataaacgatgccgaccggcgatgcggcggcgttattcccatgacccgccgggcagcttccgggaaaccaaagtctttgggttccggggggagtatggttgcaaagctgaaacttaaaggaattgacggaagggcaccaccaggagt

SEQ ID NO: 38980 - DNA, 250 bp, Homo sapiens
ggccgggcgcgacccgctccggggacagtgccaggtggggagtttgactggggcggtacacctgtcaaacggtaacgcaggtgtcctaaggcgagctcagggaggacagaaacctcccgtggagcagaagggcaaaagctcgcttgatcttgattttcagtacgaatacagaccgtgaaagcggggcctcacgatccttctgaccttttgggttttaagcaggaggtgtcagaaaagttaccacagggat

SEQ ID NO: 38981 - DNA, 19 bp, Homo sapiens
gtctacggccataccaccc

SEQ ID NO: 38982 - DNA, 38 bp, Homo sapiens
atcgcttctcggccttttggctaagatcaagtgtagta

SEQ ID NO: 38983 - DNA, 250 bp, Homo sapiens
gtagccaaatgcctcgtcatctaattagtgacgcgcatgaatggatgaacgagattcccactgtccctacctactatccagcgaaaccacagccaagggaacgggcttggcggaatcagcggggaaagaagaccctgttgagcttgactctagtctggcacggtgaagagacatgagaggtgtagaataagtgggaggcccccggcgcccccccggtgtccccgcgaggggcccggggcggggtccgccg

SEQ ID NO: 38984 - DNA, 250 bp, Homo sapiens
cgcatgaatggatgaacgagattcccactgtccctacctactatccagcgaaaccacagccaagggaacgggcttggcggaatcagcggggaaagaagaccctgttgagcttgactctagtctggcacggtgaagagacatgagaggtgtagaataagtgggaggcccccggcgcccccccggtgtccccgcgaggggcccggggcggggtccgccggccctgcgggccgccggtgaaataccactactc

SEQ ID NO: 38985 - DNA, 250 bp, Homo sapiens
ccaaatgcctcgtcatctaattagtgacgcgcatgaatggatgaacgagattcccactgtccctacctactatccagcgaaaccacagccaagggaacgggcttggcggaatcagcggggaaagaagaccctgttgagcttgactctagtctggcacggtgaagagacatgagaggtgtagaataagtgggaggcccccggcgcccccccggtgtccccgcgaggggcccggggcggggtccgccggccc

SEQ ID NO: 38986 - DNA, 250 bp, Homo sapiens
tagctggttccctccgaagtttccctcaggatagctggcgctctcgcagacccgacgcacccccgccacgcagttttatccggtaaagcgaatgattagaggtcttggggccgaaacgatctcaacctattctcaaactttaaatgggtaagaagcccggctcgctggcgtggagccgggcgtggaatgcgagtgcctagtgggccacttttggtaagcagaactggcgctgcgggatgaaccgaacgcc

SEQ ID NO: 38987 - DNA, 250 bp, Homo sapiens
tgaaacttaaaggaattgacggaagggcaccaccaggagtggagcctgcggcttaatttgactcaacacgggaaacctcacccggcccggacacggacaggattgacagattgatagctctttctcgattccgtgggtggtggtgcatggccgttcttagttggtggagcgatttgtctggttaattccgataacgaacgagactctggcatgctaactagttacgcgacccccgagcggtcggcgtccc

SEQ ID NO: 38988 - DNA, 250 bp, Homo sapiens
acctactatccagcgaaaccacagccaagggaacgggcttggcggaatcagcggggaaagaagaccctgttgagcttgactctagtctggcacggtgaagagacatgagaggtgtagaataagtgggaggcccccggcgcccccccggtgtccccgcgaggggcccggggcggggtccgccggccctgcgggccgccggtgaaataccactactctgatcgttttttcactgacccggtgaggcgggggg

SEQ ID NO: 38989 - DNA, 250 bp, Homo sapiens
aaatgcctcgtcatctaattagtgacgcgcatgaatggatgaacgagattcccactgtccctacctactatccagcgaaaccacagccaagggaacgggcttggcggaatcagcggggaaagaagaccctgttgagcttgactctagtctggcacggtgaagagacatgagaggtgtagaataagtgggaggcccccggcgcccccccggtgtccccgcgaggggcccggggcggggtccgccggccctg

SEQ ID NO: 38990 - DNA, 250 bp, Homo sapiens
ggagcctgcggcttaatttgactcaacacgggaaacctcacccggcccggacacggacaggattgacagattgatagctctttctcgattccgtgggtggtggtgcatggccgttcttagttggtggagcgatttgtctggttaattccgataacgaacgagactctggcatgctaactagttacgcgacccccgagcggtcggcgtcccccaacttcttagagggacaagtggcgttcagccacccgag

SEQ ID NO: 38991 - DNA, 250 bp, Homo sapiens
aactggcttgtggcggccaagcgttcatagcgacgtcgctttttgatccttcgatgtcggctcttcctatcattgtgaagcagaattcaccaagcgttggattgttcacccactaatagggaacgtgagctgggtttagaccgtcgtgagacaggttagttttaccctactgatgatgtgttgttgccatggtaatcctgctcagtacgagaggaaccgcaggttcagacatttggtgtatgtgcttggc

SEQ ID NO: 38992 - DNA, 102 bp, Homo sapiens
tgaacgcgcccgatctcgtctgatctcggaagctaagcagggtcgggcctggttagtacttggatgggagaccgcctgggaataccgggtgctgtaggcttt

SEQ ID NO: 38993 - DNA, 150 bp, Homo sapiens
tctgttcttatcagtttaatatctgatacgtcctctatccgaggacaatatattaaatggatttttggagcagggagatggaataggagcttgctccgtccactccacgcatcgacctggtattgcagtacctccaggaacggtgcaccc

SEQ ID NO: 38994 - protein, 4 aa, Artificial Sequence
  Description of Artificial Sequence: Synthetic peptide
  See specification as filed for detailed description of substitutions and preferred embodiments
GGGS

SEQ ID NO: 38995 - protein, 6 aa, Artificial Sequence
  Description of Artificial Sequence: Synthetic peptide
GGSGGS

SEQ ID NO: 38996 - protein, 9 aa, Artificial Sequence
  Description of Artificial Sequence: Synthetic peptide
GGSGGSGGS

SEQ ID NO: 38997 - protein, 12 aa, Artificial Sequence
  Description of Artificial Sequence: Synthetic peptide
GGSGGSGGSGGS

SEQ ID NO: 38998 - protein, 15 aa, Artificial Sequence
  Description of Artificial Sequence: Synthetic peptide
GGSGGSGGSGGSGGS

SEQ ID NO: 38999 - protein, 18 aa, Artificial Sequence
  Description of Artificial Sequence: Synthetic peptide
GGSGGSGGSGGSGGSGGS

SEQ ID NO: 39000 - protein, 5 aa, Artificial Sequence
  Description of Artificial Sequence: Synthetic peptide
GGGGS

SEQ ID NO: 39001 - protein, 10 aa, Artificial Sequence
  Description of Artificial Sequence: Synthetic peptide
GGGGSGGGGS

SEQ ID NO: 39002 - protein, 15 aa, Artificial Sequence
  Description of Artificial Sequence: Synthetic peptide
GGGGSGGGGSGGGGS

SEQ ID NO: 39003 - protein, 20 aa, Artificial Sequence
  Description of Artificial Sequence: Synthetic peptide
GGGGSGGGGSGGGGSGGGGS

SEQ ID NO: 39004 - protein, 25 aa, Artificial Sequence
  Description of Artificial Sequence: Synthetic peptide
GGGGSGGGGSGGGGSGGGGSGGGGS

SEQ ID NO: 39005 - protein, 30 aa, Artificial Sequence
  Description of Artificial Sequence: Synthetic polypeptide
GGGGSGGGGSGGGGSGGGGSGGGGSGGGGS

SEQ ID NO: 39006 - protein, 4 aa, Artificial Sequence
  Description of Artificial Sequence: Synthetic peptide
GGGG

SEQ ID NO: 39007 - protein, 5 aa, Artificial Sequence
  Description of Artificial Sequence: Synthetic peptide
GGGGG

SEQ ID NO: 39008 - protein, 6 aa, Artificial Sequence
  Description of Artificial Sequence: Synthetic peptide
GGGGGG

SEQ ID NO: 39009 - protein, 7 aa, Artificial Sequence
  Description of Artificial Sequence: Synthetic peptide
GGGGGGG

SEQ ID NO: 39010 - protein, 8 aa, Artificial Sequence
  Description of Artificial Sequence: Synthetic peptide
GGGGGGGG

SEQ ID NO: 39011 - protein, 6 aa, Artificial Sequence
  Description of Artificial Sequence: Synthetic peptide
GSSGSS

SEQ ID NO: 39012 - protein, 9 aa, Artificial Sequence
  Description of Artificial Sequence: Synthetic peptide
GSSGSSGSS

SEQ ID NO: 39013 - protein, 12 aa, Artificial Sequence
  Description of Artificial Sequence: Synthetic peptide
GSSGSSGSSGSS

SEQ ID NO: 39014 - protein, 15 aa, Artificial Sequence
  Description of Artificial Sequence: Synthetic peptide
GSSGSSGSSGSSGSS

SEQ ID NO: 39015 - protein, 18 aa, Artificial Sequence
  Description of Artificial Sequence: Synthetic peptide
GSSGSSGSSGSSGSSGSS

SEQ ID NO: 39016 - protein, 5 aa, Artificial Sequence
  Description of Artificial Sequence: Synthetic peptide
EAAAK

SEQ ID NO: 39017 - protein, 10 aa, Artificial Sequence
  Description of Artificial Sequence: Synthetic peptide
EAAAKEAAAK

SEQ ID NO: 39018 - protein, 15 aa, Artificial Sequence
  Description of Artificial Sequence: Synthetic peptide
EAAAKEAAAKEAAAK

SEQ ID NO: 39019 - protein, 20 aa, Artificial Sequence
  Description of Artificial Sequence: Synthetic peptide
EAAAKEAAAKEAAAKEAAAK

SEQ ID NO: 39020 - protein, 25 aa, Artificial Sequence
  Description of Artificial Sequence: Synthetic peptide
EAAAKEAAAKEAAAKEAAAKEAAAK

SEQ ID NO: 39021 - protein, 30 aa, Artificial Sequence
  Description of Artificial Sequence: Synthetic polypeptide
EAAAKEAAAKEAAAKEAAAKEAAAKEAAAK

SEQ ID NO: 39022 - protein, 5 aa, Artificial Sequence
  Description of Artificial Sequence: Synthetic peptide
PAPAP

SEQ ID NO: 39023 - protein, 7 aa, Artificial Sequence
  Description of Artificial Sequence: Synthetic peptide
PAPAPAP

SEQ ID NO: 39024 - protein, 9 aa, Artificial Sequence
  Description of Artificial Sequence: Synthetic peptide
PAPAPAPAP

SEQ ID NO: 39025 - protein, 11 aa, Artificial Sequence
  Description of Artificial Sequence: Synthetic peptide
PAPAPAPAPAP

SEQ ID NO: 39026 - protein, 13 aa, Artificial Sequence
  Description of Artificial Sequence: Synthetic peptide
PAPAPAPAPAPAP

SEQ ID NO: 39027 - protein, 6 aa, Artificial Sequence
  Description of Artificial Sequence: Synthetic peptide
GGSGGG

SEQ ID NO: 39028 - protein, 6 aa, Artificial Sequence
  Description of Artificial Sequence: Synthetic peptide
GGGGGS

SEQ ID NO: 39029 - protein, 6 aa, Artificial Sequence
  Description of Artificial Sequence: Synthetic peptide
GGSGSS

SEQ ID NO: 39030 - protein, 6 aa, Artificial Sequence
  Description of Artificial Sequence: Synthetic peptide
GSSGGS

SEQ ID NO: 39031 - protein, 8 aa, Artificial Sequence
  Description of Artificial Sequence: Synthetic peptide
GGSEAAAK

SEQ ID NO: 39032 - protein, 8 aa, Artificial Sequence
  Description of Artificial Sequence: Synthetic peptide
EAAAKGGS

SEQ ID NO: 39033 - protein, 6 aa, Artificial Sequence
  Description of Artificial Sequence: Synthetic peptide
GGSPAP

SEQ ID NO: 39034 - protein, 6 aa, Artificial Sequence
  Description of Artificial Sequence: Synthetic peptide
PAPGGS

SEQ ID NO: 39035 - protein, 6 aa, Artificial Sequence
  Description of Artificial Sequence: Synthetic peptide
GGGGSS

SEQ ID NO: 39036 - protein, 6 aa, Artificial Sequence
  Description of Artificial Sequence: Synthetic peptide
GSSGGG

SEQ ID NO: 39037 - protein, 8 aa, Artificial Sequence
  Description of Artificial Sequence: Synthetic peptide
GGGEAAAK

SEQ ID NO: 39038 - protein, 8 aa, Artificial Sequence
  Description of Artificial Sequence: Synthetic peptide
EAAAKGGG

SEQ ID NO: 39039 - protein, 6 aa, Artificial Sequence
  Description of Artificial Sequence: Synthetic peptide
GGGPAP

SEQ ID NO: 39040 - protein, 6 aa, Artificial Sequence
  Description of Artificial Sequence: Synthetic peptide
PAPGGG

SEQ ID NO: 39041 - protein, 8 aa, Artificial Sequence
  Description of Artificial Sequence: Synthetic peptide
GSSEAAAK

SEQ ID NO: 39042 - protein, 8 aa, Artificial Sequence
  Description of Artificial Sequence: Synthetic peptide
EAAAKGSS

SEQ ID NO: 39043 - protein, 6 aa, Artificial Sequence
  Description of Artificial Sequence: Synthetic peptide
GSSPAP

SEQ ID NO: 39044 - protein, 6 aa, Artificial Sequence
  Description of Artificial Sequence: Synthetic peptide
PAPGSS

SEQ ID NO: 39045 - protein, 8 aa, Artificial Sequence
  Description of Artificial Sequence: Synthetic peptide
EAAAKPAP

SEQ ID NO: 39046 - protein, 8 aa, Artificial Sequence
  Description of Artificial Sequence: Synthetic peptide
PAPEAAAK

SEQ ID NO: 39047 - protein, 9 aa, Artificial Sequence
  Description of Artificial Sequence: Synthetic peptide
GGSGGGGSS

SEQ ID NO: 39048 - protein, 9 aa, Artificial Sequence
  Description of Artificial Sequence: Synthetic peptide
GGSGSSGGG

SEQ ID NO: 39049 - protein, 9 aa, Artificial Sequence
  Description of Artificial Sequence: Synthetic peptide
GGGGGSGSS

SEQ ID NO: 39050 - protein, 9 aa, Artificial Sequence
  Description of Artificial Sequence: Synthetic peptide
GGGGSSGGS

SEQ ID NO: 39051 - protein, 9 aa, Artificial Sequence
  Description of Artificial Sequence: Synthetic peptide
GSSGGSGGG

SEQ ID NO: 39052 - protein, 9 aa, Artificial Sequence
  Description of Artificial Sequence: Synthetic peptide
GSSGGGGGS

SEQ ID NO: 39053 - protein, 11 aa, Artificial Sequence
  Description of Artificial Sequence: Synthetic peptide
GGSGGGEAAAK

SEQ ID NO: 39054 - protein, 11 aa, Artificial Sequence
  Description of Artificial Sequence: Synthetic peptide
GGSEAAAKGGG

SEQ ID NO: 39055 - protein, 11 aa, Artificial Sequence
  Description of Artificial Sequence: Synthetic peptide
GGGGGSEAAAK

SEQ ID NO: 39056 - protein, 11 aa, Artificial Sequence
  Description of Artificial Sequence: Synthetic peptide
GGGEAAAKGGS

SEQ ID NO: 39057 - protein, 11 aa, Artificial Sequence
  Description of Artificial Sequence: Synthetic peptide
EAAAKGGSGGG

SEQ ID NO: 39058 - protein, 11 aa, Artificial Sequence
  Description of Artificial Sequence: Synthetic peptide
EAAAKGGGGGS

SEQ ID NO: 39059 - protein, 9 aa, Artificial Sequence
  Description of Artificial Sequence: Synthetic peptide
GGSGGGPAP

SEQ ID NO: 39060 - protein, 9 aa, Artificial Sequence
  Description of Artificial Sequence: Synthetic peptide
GGSPAPGGG

SEQ ID NO: 39061 - protein, 9 aa, Artificial Sequence
  Description of Artificial Sequence: Synthetic peptide
GGGGGSPAP

SEQ ID NO: 39062 - protein, 9 aa, Artificial Sequence
  Description of Artificial Sequence: Synthetic peptide
GGGPAPGGS

SEQ ID NO: 39063 - protein, 9 aa, Artificial Sequence
  Description of Artificial Sequence: Synthetic peptide
PAPGGSGGG

SEQ ID NO: 39064 - protein, 9 aa, Artificial Sequence
  Description of Artificial Sequence: Synthetic peptide
PAPGGGGGS

SEQ ID NO: 39065 - protein, 11 aa, Artificial Sequence
  Description of Artificial Sequence: Synthetic peptide
GGSGSSEAAAK

SEQ ID NO: 39066 - protein, 11 aa, Artificial Sequence
  Description of Artificial Sequence: Synthetic peptide
GGSEAAAKGSS

SEQ ID NO: 39067 - protein, 11 aa, Artificial Sequence
  Description of Artificial Sequence: Synthetic peptide
GSSGGSEAAAK

SEQ ID NO: 39068 - protein, 11 aa, Artificial Sequence
  Description of Artificial Sequence: Synthetic peptide
GSSEAAAKGGS

SEQ ID NO: 39069 - protein, 11 aa, Artificial Sequence
  Description of Artificial Sequence: Synthetic peptide
EAAAKGGSGSS

SEQ ID NO: 39070 - protein, 11 aa, Artificial Sequence
  Description of Artificial Sequence: Synthetic peptide
EAAAKGSSGGS

SEQ ID NO: 39071 - protein, 9 aa, Artificial Sequence
  Description of Artificial Sequence: Synthetic peptide
GGSGSSPAP

SEQ ID NO: 39072 - protein, 9 aa, Artificial Sequence
  Description of Artificial Sequence: Synthetic peptide
GGSPAPGSS

SEQ ID NO: 39073 - protein, 9 aa, Artificial Sequence
  Description of Artificial Sequence: Synthetic peptide
GSSGGSPAP

SEQ ID NO: 39074 - protein, 9 aa, Artificial Sequence
  Description of Artificial Sequence: Synthetic peptide
GSSPAPGGS

SEQ ID NO: 39075 - protein, 9 aa, Artificial Sequence
  Description of Artificial Sequence: Synthetic peptide
PAPGGSGSS

SEQ ID NO: 39076 - protein, 9 aa, Artificial Sequence
  Description of Artificial Sequence: Synthetic peptide
PAPGSSGGS

SEQ ID NO: 39077 - protein, 11 aa, Artificial Sequence
  Description of Artificial Sequence: Synthetic peptide
GGSEAAAKPAP

SEQ ID NO: 39078 - protein, 11 aa, Artificial Sequence
  Description of Artificial Sequence: Synthetic peptide
GGSPAPEAAAK

SEQ ID NO: 39079 - protein, 11 aa, Artificial Sequence
  Description of Artificial Sequence: Synthetic peptide
EAAAKGGSPAP

SEQ ID NO: 39080 - protein, 11 aa, Artificial Sequence
  Description of Artificial Sequence: Synthetic peptide
EAAAKPAPGGS

SEQ ID NO: 39081 - protein, 11 aa, Artificial Sequence
  Description of Artificial Sequence: Synthetic peptide
PAPGGSEAAAK

SEQ ID NO: 39082 - protein, 11 aa, Artificial Sequence
  Description of Artificial Sequence: Synthetic peptide
PAPEAAAKGGS

SEQ ID NO: 39083 - protein, 11 aa, Artificial Sequence
  Description of Artificial Sequence: Synthetic peptide
GGGGSSEAAAK

SEQ ID NO: 39084 - protein, 11 aa, Artificial Sequence
  Description of Artificial Sequence: Synthetic peptide
GGGEAAAKGSS

SEQ ID NO: 39085 - protein, 11 aa, Artificial Sequence
  Description of Artificial Sequence: Synthetic peptide
GSSGGGEAAAK

SEQ ID NO: 39086 - protein, 11 aa, Artificial Sequence
  Description of Artificial Sequence: Synthetic peptide
GSSEAAAKGGG

SEQ ID NO: 39087 - protein, 11 aa, Artificial Sequence
  Description of Artificial Sequence: Synthetic peptide
EAAAKGGGGSS

SEQ ID NO: 39088 - protein, 11 aa, Artificial Sequence
  Description of Artificial Sequence: Synthetic peptide
EAAAKGSSGGG

SEQ ID NO: 39089 - protein, 9 aa, Artificial Sequence
  Description of Artificial Sequence: Synthetic peptide
GGGGSSPAP

SEQ ID NO: 39090 - protein, 9 aa, Artificial Sequence
  Description of Artificial Sequence: Synthetic peptide
GGGPAPGSS

SEQ ID NO: 39091 - protein, 9 aa, Artificial Sequence
  Description of Artificial Sequence: Synthetic peptide
GSSGGGPAP

SEQ ID NO: 39092 - protein, 9 aa, Artificial Sequence
  Description of Artificial Sequence: Synthetic peptide
GSSPAPGGG

SEQ ID NO: 39093 - protein, 9 aa, Artificial Sequence
  Description of Artificial Sequence: Synthetic peptide
PAPGGGGSS

SEQ ID NO: 39094 - protein, 9 aa, Artificial Sequence
  Description of Artificial Sequence: Synthetic peptide
PAPGSSGGG

SEQ ID NO: 39095 - protein, 11 aa, Artificial Sequence
  Description of Artificial Sequence: Synthetic peptide
GGGEAAAKPAP

SEQ ID NO: 39096 - protein, 11 aa, Artificial Sequence
  Description of Artificial Sequence: Synthetic peptide
GGGPAPEAAAK

SEQ ID NO: 39097 - protein, 11 aa, Artificial Sequence
  Description of Artificial Sequence: Synthetic peptide
EAAAKGGGPAP

SEQ ID NO: 39098 - protein, 11 aa, Artificial Sequence
  Description of Artificial Sequence: Synthetic peptide
EAAAKPAPGGG

SEQ ID NO: 39099 - protein, 11 aa, Artificial Sequence
  Description of Artificial Sequence: Synthetic peptide
PAPGGGEAAAK

SEQ ID NO: 39100 - protein, 11 aa, Artificial Sequence
  Description of Artificial Sequence: Synthetic peptide
PAPEAAAKGGG

SEQ ID NO: 39101 - protein, 11 aa, Artificial Sequence
  Description of Artificial Sequence: Synthetic peptide
GSSEAAAKPAP

SEQ ID NO: 39102 - protein, 11 aa, Artificial Sequence
  Description of Artificial Sequence: Synthetic peptide
GSSPAPEAAAK

SEQ ID NO: 39103 - protein, 11 aa, Artificial Sequence
  Description of Artificial Sequence: Synthetic peptide
EAAAKGSSPAP

SEQ ID NO: 39104 - protein, 11 aa, Artificial Sequence
  Description of Artificial Sequence: Synthetic peptide
EAAAKPAPGSS

SEQ ID NO: 39105 - protein, 11 aa, Artificial Sequence
  Description of Artificial Sequence: Synthetic peptide
PAPGSSEAAAK

SEQ ID NO: 39106 - protein, 11 aa, Artificial Sequence
  Description of Artificial Sequence: Synthetic peptide
PAPEAAAKGSS

SEQ ID NO: 39107 - protein, 46 aa, Artificial Sequence
  Description of Artificial Sequence: Synthetic polypeptide
AEAAAKEAAAKEAAAKEAAAKALEAEAAAKEAAAKEAAAKEAAAKA

SEQ ID NO: 39108 - protein, 15 aa, Artificial Sequence
  Description of Artificial Sequence: Synthetic peptide
GGGGSEAAAKGGGGS

SEQ ID NO: 39109 - protein, 15 aa, Artificial Sequence
  Description of Artificial Sequence: Synthetic peptide
EAAAKGGGGSEAAAK

SEQ ID NO: 39110 - protein, 12 aa, Artificial Sequence
  Description of Artificial Sequence: Synthetic peptide
GSAGSAAGSGEF

SEQ ID NO: 39111 - protein, 33 aa, Artificial Sequence
  Description of Artificial Sequence: Synthetic polypeptide
SGGSSGGSSGSETPGTSESATPESSGGSSGGSS

SEQ ID NO: 39112 - RNA, 21 nt, Homo sapiens
cauaaaguagaaagcacuacu

SEQ ID NO: 39113 - RNA, 23 nt, Homo sapiens
uguaguguuuccuacuuuaugga

SEQ ID NO: 39114 - RNA, 24 nt, Homo sapiens
uuuggcaaugguagaacucacacu

SEQ ID NO: 39115 - RNA, 21 nt, Homo sapiens
ugguucuagacuugccaacua

SEQ ID NO: 39116 - RNA, 22 nt, Homo sapiens
uauggcacugguagaauucacu

SEQ ID NO: 39117 - RNA, 22 nt, Homo sapiens
gugaauuaccgaagggccauaa

SEQ ID NO: 39118 - RNA, 22 nt, Homo sapiens
uggagugugacaaugguguuug

SEQ ID NO: 39119 - RNA, 22 nt, Homo sapiens
aacgccauuaucacacuaaaua

SEQ ID NO: 39120 - RNA, 47 nt, Artificial Sequence
  Description of Artificial Sequence: Synthetic oligonucleotide
gggaaauaagagagaaaagaagaguaagaagaaauauaagagccacc

SEQ ID NO: 39121 - RNA, 110 nt, Artificial Sequence
  Description of Artificial Sequence: Synthetic polynucleotide
ugauaauaggcuggagccucgguggccaugcuucuugccccuugggccuccccccagccccuccuccccuuccugcacccguacccccguggucuuugaauaaagucuga

SEQ ID NO: 39122 - protein, 500 aa, Human immunodeficiency virus type 1
MGARASVLSGGELDRWEKIRLRPGGKKKYKLKHIVWASRELERFAVNPGLLETSEGCRQILGQLQPSLQTGSEELRSLYNTVATLYCVHQRIEIKDTKEALDKIEEEQNKSKKKAQQAAADTGHSNQVSQNYPIVQNIQGQMVHQAISPRTLNAWVKVVEEKAFSPEVIPMFSALSEGATPQDLNTMLNTVGGHQAAMQMLKETINEEAAEWDRVHPVHAGPIAPGQMREPRGSDIAGTTSTLQEQIGWMTNNPPIPVGEIYKRWIILGLNKIVRMYSPTSILDIRQGPKEPFRDYVDRFYKTLRAEQASQEVKNWMTETLLVQNANPDCKTILKALGPAATLEEMMTACQGVGGPGHKARVLAEAMSQVTNSATIMMQRGNFRNQRKIVKCFNCGKEGHTARNCRAPRKKGCWKCGKEGHQMKDCTERQANFLGKIWPSYKGRPGNFLQSRPEPTAPPEESFRSGVETTTPPQKQEPIDKELYPLTSLRSLFGNDPSSQ

SEQ ID NO: 39123 - protein, 1435 aa, Human immunodeficiency virus type 1
MGARASVLSGGELDRWEKIRLRPGGKKKYKLKHIVWASRELERFAVNPGLLETSEGCRQILGQLQPSLQTGSEELRSLYNTVATLYCVHQRIEIKDTKEALDKIEEEQNKSKKKAQQAAADTGHSNQVSQNYPIVQNIQGQMVHQAISPRTLNAWVKVVEEKAFSPEVIPMFSALSEGATPQDLNTMLNTVGGHQAAMQMLKETINEEAAEWDRVHPVHAGPIAPGQMREPRGSDIAGTTSTLQEQIGWMTNNPPIPVGEIYKRWIILGLNKIVRMYSPTSILDIRQGPKEPFRDYVDRFYKTLRAEQASQEVKNWMTETLLVQNANPDCKTILKALGPAATLEEMMTACQGVGGPGHKARVLAEAMSQVTNSATIMMQRGNFRNQRKIVKCFNCGKEGHTARNCRAPRKKGCWKCGKEGHQMKDCTERQANFLREDLAFLQGKAREFSSEQTRANSPTRRELQVWGRDNNSPSEAGADRQGTVSFNFPQVTLWQRPLVTIKIGGQLKEALLDTGADDTVLEEMSLPGRWKPKMIGGIGGFIKVRQYDQILIEICGHKAIGTVLVGPTPVNIIGRNLLTQIGCTLNFPISPIETVPVKLKPGMDGPKVKQWPLTEEKIKALVEICTEMEKEGKISKIGPENPYNTPVFAIKKKDSTKWRKLVDFRELNKRTQDFWEVQLGIPHPAGLKKKKSVTVLDVGDAYFSVPLDEDFRKYTAFTIPSINNETPGIRYQYNVLPQGWKGSPAIFQSSMTKILEPFRKQNPDIVIYQYMDDLYVGSDLEIGQHRTKIEELRQHLLRWGLTTPDKKHQKEPPFLWMGYELHPDKWTVQPIVLPEKDSWTVNDIQKLVGKLNWASQIYPGIKVRQLCKLLRGTKALTEVIPLTEEAELELAENREILKEPVHGVYYDPSKDLIAEIQKQGQGQWTYQIYQEPFKNLKTGKYARMRGAHTNDVKQLTEAVQKITTESIVIWGKTPKFKLPIQKETWETWWTEYWQATWIPEWEFVNTPPLVKLWYQLEKEPIVGAETFYVDGAANRETKLGKAGYVTNRGRQKVVTLTDTTNQKTELQAIYLALQDSGLEVNIVTDSQYALGIIQAQPDQSESELVNQIIEQLIKKEKVYLAWVPAHKGIGGNEQVDKLVSAGIRKVLFLDGIDKAQDEHEKYHSNWRAMASDFNLPPVVAKEIVASCDKCQLKGEAMHGQVDCSPGIWQLDCTHLEGKVILVAVHVASGYIEAEVIPAETGQETAYFLLKLAGRWPVKTIHTDNGSNFTGATVRAACWWAGIKQEFGIPYNPQSQGVVESMNKELKKIIGQVRDQAEHLKTAVQMAVFIHNFKRKGGIGGYSAGERIVDIIATDIQTKELQKQITKIQNFRVYYRDSRNPLWKGPAKLLWKGEGAVVIQDNSDIKVVPRRKAKIIRDYGKQMAGDDCVASRQDED

SEQ ID NO: 39124 - protein, 856 aa, Human immunodeficiency virus type 1
MRVKEKYQHLWRWGWRWGTMLLGMLMICSATEKLWVTVYYGVPVWKEATTTLFCASDAKAYDTEVHNVWATHACVPTDPNPQEVVLVNVTENFNMWKNDMVEQMHEDIISLWDQSLKPCVKLTPLCVSLKCTDLKNDTNTNSSSGRMIMEKGEIKNCSFNISTSIRGKVQKEYAFFYKLDIIPIDNDTTSYKLTSCNTSVITQACPKVSFEPIPIHYCAPAGFAILKCNNKTFNGTGPCTNVSTVQCTHGIRPVVSTQLLLNGSLAEEEVVIRSVNFTDNAKTIIVQLNTSVEINCTRPNNNTRKRIRIQRGPGRAFVTIGKIGNMRQAHCNISRAKWNNTLKQIASKLREQFGNNKTIIFKQSSGGDPEIVTHSFNCGGEFFYCNSTQLFNSTWFNSTWSTEGSNNTEGSDTITLPCRIKQIINMWQKVGKAMYAPPISGQIRCSSNITGLLLTRDGGNSNNESEIFRPGGGDMRDNWRSELYKYKVVKIEPLGVAPTKAKRRVVQREKRAVGIGALFLGFLGAAGSTMGAASMTLTVQARQLLSGIVQQQNNLLRAIEAQQHLLQLTVWGIKQLQARILAVERYLKDQQLLGIWGCSGKLICTTAVPWNASWSNKSLEQIWNHTTWMEWDREINNYTSLIHSLIEESQNQQEKNEQELLELDKWASLWNWFNITNWLWYIKLFIMIVGGLVGLRIVFAVLSIVNRVRQGYSPLSFQTHLPTPRGPDRPEGIEEEGGERDRDRSIRLVNGSLALIWDDLRSLCLFSYHRLRDLLLIVTRIVELLGRRGWEALKYWWNLLQYWSQELKNSAVSLLNATAIAVAEGTDRVIEVVQGACRAIRHIPRRIRQGLERILL

SEQ ID NO: 39125 - protein, 131 aa, Human immunodeficiency virus type 1
GARASVLSGGELDRWEKIRLRPGGKKKYKLKHIVWASRELERFAVNPGLLETSEGCRQILGQLQPSLQTGSEELRSLYNTVATLYCVHQRIEIKDTKEALDKIEEEQNKSKKKAQQAAADTGHSNQVSQNY

SEQ ID NO: 39126 - protein, 231 aa, Human immunodeficiency virus type 1
PIVQNIQGQMVHQAISPRTLNAWVKVVEEKAFSPEVIPMFSALSEGATPQDLNTMLNTVGGHQAAMQMLKETINEEAAEWDRVHPVHAGPIAPGQMREPRGSDIAGTTSTLQEQIGWMTNNPPIPVGEIYKRWIILGLNKIVRMYSPTSILDIRQGPKEPFRDYVDRFYKTLRAEQASQEVKNWMTETLLVQNANPDCKTILKALGPAATLEEMMTACQGVGGPGHKARVL

SEQ ID NO: 39127 - protein, 55 aa, Human immunodeficiency virus type 1
MQRGNFRNQRKIVKCFNCGKEGHTARNCRAPRKKGCWKCGKEGHQMKDCTERQAN

SEQ ID NO: 39128 - protein, 48 aa, Human immunodeficiency virus type 1
LQGKAREFSSEQTRANSPTRRELQVWGRDNNSPSEAGADRQGTVSFNF

SEQ ID NO: 39129 - protein, 99 aa, Human immunodeficiency virus type 1
PQVTLWQRPLVTIKIGGQLKEALLDTGADDTVLEEMSLPGRWKPKMIGGIGGFIKVRQYDQILIEICGHKAIGTVLVGPTPVNIIGRNLLTQIGCTLNF

SEQ ID NO: 39130 - protein, 560 aa, Human immunodeficiency virus type 1
PISPIETVPVKLKPGMDGPKVKQWPLTEEKIKALVEICTEMEKEGKISKIGPENPYNTPVFAIKKKDSTKWRKLVDFRELNKRTQDFWEVQLGIPHPAGLKKKKSVTVLDVGDAYFSVPLDEDFRKYTAFTIPSINNETPGIRYQYNVLPQGWKGSPAIFQSSMTKILEPFRKQNPDIVIYQYMDDLYVGSDLEIGQHRTKIEELRQHLLRWGLTTPDKKHQKEPPFLWMGYELHPDKWTVQPIVLPEKDSWTVNDIQKLVGKLNWASQIYPGIKVRQLCKLLRGTKALTEVIPLTEEAELELAENREILKEPVHGVYYDPSKDLIAEIQKQGQGQWTYQIYQEPFKNLKTGKYARMRGAHTNDVKQLTEAVQKITTESIVIWGKTPKFKLPIQKETWETWWTEYWQATWIPEWEFVNTPPLVKLWYQLEKEPIVGAETFYVDGAANRETKLGKAGYVTNRGRQKVVTLTDTTNQKTELQAIYLALQDSGLEVNIVTDSQYALGIIQAQPDQSESELVNQIIEQLIKKEKVYLAWVPAHKGIGGNEQVDKLVSAGIRKVL

SEQ ID NO: 39131 - protein, 440 aa, Human immunodeficiency virus type 1
PISPIETVPVKLKPGMDGPKVKQWPLTEEKIKALVEICTEMEKEGKISKIGPENPYNTPVFAIKKKDSTKWRKLVDFRELNKRTQDFWEVQLGIPHPAGLKKKKSVTVLDVGDAYFSVPLDEDFRKYTAFTIPSINNETPGIRYQYNVLPQGWKGSPAIFQSSMTKILEPFRKQNPDIVIYQYMDDLYVGSDLEIGQHRTKIEELRQHLLRWGLTTPDKKHQKEPPFLWMGYELHPDKWTVQPIVLPEKDSWTVNDIQKLVGKLNWASQIYPGIKVRQLCKLLRGTKALTEVIPLTEEAELELAENREILKEPVHGVYYDPSKDLIAEIQKQGQGQWTYQIYQEPFKNLKTGKYARMRGAHTNDVKQLTEAVQKITTESIVIWGKTPKFKLPIQKETWETWWTEYWQATWIPEWEFVNTPPLVKLWYQLEKEPIVGAETF

SEQ ID NO: 39132 - protein, 120 aa, Human immunodeficiency virus type 1
YVDGAANRETKLGKAGYVTNRGRQKVVTLTDTTNQKTELQAIYLALQDSGLEVNIVTDSQYALGIIQAQPDQSESELVNQIIEQLIKKEKVYLAWVPAHKGIGGNEQVDKLVSAGIRKVL

SEQ ID NO: 39133 - protein, 288 aa, Human immunodeficiency virus type 1
FLDGIDKAQDEHEKYHSNWRAMASDFNLPPVVAKEIVASCDKCQLKGEAMHGQVDCSPGIWQLDCTHLEGKVILVAVHVASGYIEAEVIPAETGQETAYFLLKLAGRWPVKTIHTDNGSNFTGATVRAACWWAGIKQEFGIPYNPQSQGVVESMNKELKKIIGQVRDQAEHLKTAVQMAVFIHNFKRKGGIGGYSAGERIVDIIATDIQTKELQKQITKIQNFRVYYRDSRNPLWKGPAKLLWKGEGAVVIQDNSDIKVVPRRKAKIIRDYGKQMAGDDCVASRQDED

SEQ ID NO: 39134 - protein, 70 aa, Human immunodeficiency virus type 1
KEALLDTGADDTVLEEMSLPGRWKPKMIGGIGGFIKVRQYDQILIEICGHKAIGTVLVGPTPVNIIGRNL

SEQ ID NO: 39135 - protein, 191 aa, Human immunodeficiency virus type 1
EGKISKIGPENPYNTPVFAIKKKDSTKWRKLVDFRELNKRTQDFWEVQLGIPHPAGLKKKKSVTVLDVGDAYFSVPLDEDFRKYTAFTIPSINNETPGIRYQYNVLPQGWKGSPAIFQSSMTKILEPFRKQNPDIVIYQYMDDLYVGSDLEIGQHRTKIEELRQHLLRWGLTTPDKKHQKEPPFLWMGYEL

SEQ ID NO: 39136 - protein, 124 aa, Human immunodeficiency virus type 1
IVGAETFYVDGAANRETKLGKAGYVTNRGRQKVVTLTDTTNQKTELQAIYLALQDSGLEVNIVTDSQYALGIIQAQPDQSESELVNQIIEQLIKKEKVYLAWVPAHKGIGGNEQVDKLVSAGIR

SEQ ID NO: 39137 - protein, 151 aa, Human immunodeficiency virus type 1
VDCSPGIWQLDCTHLEGKVILVAVHVASGYIEAEVIPAETGQETAYFLLKLAGRWPVKTIHTDNGSNFTGATVRAACWWAGIKQEFGIPYNPQSQGVVESMNKELKKIIGQVRDQAEHLKTAVQMAVFIHNFKRKGGIGGYSAGERIVDII

SEQ ID NO: 39138 - protein, 7 aa, Human immunodeficiency virus type 1
WEKIRLR

SEQ ID NO: 39139 - protein, 7 aa, Human immunodeficiency virus type 1
KKKYKLK

SEQ ID NO: 39140 - protein, 17 aa, Human immunodeficiency virus type 1
WETWWTEYWQATWIPEW

SEQ ID NO: 39141 - protein, 9 aa, Artificial Sequence
  Description of Artificial Sequence: Synthetic peptide
RRRRRRRRR

SEQ ID NO: 39142 - DNA, 25 bp, Unknown
  Description of Unknown: Erysipelothrix phage phi1605 sequence
ttacatcttcaagctcacttgcaac

SEQ ID NO: 39143 - DNA, 25 bp, Unknown
  Description of Unknown: Streptomyces phage SV1 sequence
cgcggtcgcgccgcgtgcggtcgtt

SEQ ID NO: 39144 - DNA, 25 bp, Unknown
  Description of Unknown: Clostridium phage HM T sequence
gctacatagtcgccagtacctccct

SEQ ID NO: 39145 - DNA, 25 bp, Unknown
  Description of Unknown: Streptococcus phage Javan255 sequence
tcaggtagtgaaccgttttttgttg

SEQ ID NO: 39146 - DNA, 25 bp, Unknown
  Description of Unknown: Streptococcus phage Javan639 sequence
aattagtagtgaaccgttttttgtg

SEQ ID NO: 39147 - DNA, 25 bp, Unknown
  Description of Unknown: Streptococcus phage Javan122 sequence
tctcgtattgaggtggcgatttttt

SEQ ID NO: 39148 - DNA, 25 bp, Unknown
  Description of Unknown: Streptococcus phage Javan261 sequence
agaattatataataatacccatggt

SEQ ID NO: 39149 - DNA, 25 bp, Unknown
  Description of Unknown: Faecalibacterium phage FP_Epona sequence
tataaacaacatagagcggtcaata

SEQ ID NO: 39150 - DNA, 25 bp, Unknown
  Description of Unknown: Faecalibacterium phage FP_Toutatis sequence
gctttttgaaaaaacggaggtttca

SEQ ID NO: 39151 - DNA, 25 bp, Unknown
  Description of Unknown: Streptococcus phage Javan422 sequence
caaatttatcagatttttttgacat

SEQ ID NO: 39152 - DNA, 25 bp, Unknown
  Description of Unknown: Caldibacillus phage CBP1 sequence
attcacaaatgatcgggaggggaag

SEQ ID NO: 39153 - DNA, 25 bp, Unknown
  Description of Unknown: Clostridium phage phiCT9441A sequence
tctgtacctaaaacatccattaaag

SEQ ID NO: 39154 - DNA, 25 bp, Unknown
  Description of Unknown: Streptococcus phage Javan215 sequence
ctatgtcaacgacttactcaaactt

SEQ ID NO: 39155 - DNA, 25 bp, Unknown
  Description of Unknown: Streptococcus phage Javan202 sequence
cgccctctttaccaattattcagcg

SEQ ID NO: 39156 - DNA, 25 bp, Unknown
  Description of Unknown: Streptococcus phage Javan444 sequence
tcttatgaaaaaggagcttgtcctt

SEQ ID NO: 39157 - DNA, 25 bp, Unknown
  Description of Unknown: Streptococcus phage phiARI0004 sequence
aaaagcacgctgataatcagcaaga

SEQ ID NO: 39158 - DNA, 25 bp, Unknown
  Description of Unknown: Streptococcus phage Javan241 sequence
tttatccgcattttccgatgcgttt

SEQ ID NO: 39159 - DNA, 25 bp, Unknown
  Description of Unknown: Streptococcus phage Javan206 sequence
atataacaaaagcgagcgaggtagt

SEQ ID NO: 39160 - DNA, 25 bp, Unknown
  Description of Unknown: Streptococcus phage Javan394 sequence
agatactctttccaacctatttgtt

SEQ ID NO: 39161 - DNA, 25 bp, Unknown
  Description of Unknown: Paenibacillus phage phiERICV sequence
agttcttggggaatcaaatgaagag

SEQ ID NO: 39162 - DNA, 25 bp, Unknown
  Description of Unknown: Streptococcus phage Javan247 sequence
attttatcagagtttccgctctgtt

SEQ ID NO: 39163 - DNA, 25 bp, Unknown
  Description of Unknown: Streptococcus phage Javan645 sequence
gtatatttaaagtctatttaaacag

SEQ ID NO: 39164 - DNA, 25 bp, Unknown
  Description of Unknown: Streptococcus phage Javan116 sequence
aacaccagtctttcgactggtgcaa

SEQ ID NO: 39165 - DNA, 25 bp, Unknown
  Description of Unknown: Streptococcus phage Javan210 sequence
taatatcaacgacttacacaaactt

SEQ ID NO: 39166 - DNA, 25 bp, Unknown
  Description of Unknown: Streptococcus phage Javan284 sequence
agacggtcaacagaccgccttttat

SEQ ID NO: 39167 - DNA, 25 bp, Unknown
  Description of Unknown: Streptococcus phage Javan117 sequence
aaagataaaacaaaagaggtaaaac

SEQ ID NO: 39168 - DNA, 25 bp, Unknown
  Description of Unknown: Acidithiobacillus phage AcaML1 sequence
ccccagagagacgggtttgtctttt

SEQ ID NO: 39169 - DNA, 25 bp, Unknown
  Description of Unknown: Streptococcus phage phiJH1301-2 sequence
agtggtccaaaaatagaaagtagaa

SEQ ID NO: 39170 - DNA, 25 bp, Unknown
  Description of Unknown: Streptococcus phage Javan123 sequence
ctcaattgtgaggtggcgatttttt

SEQ ID NO: 39171 - DNA, 25 bp, Unknown
  Description of Unknown: Streptococcus phage Javan369 sequence
ctcaattgtgaggtggcgatttttt

SEQ ID NO: 39172 - DNA, 25 bp, Unknown
  Description of Unknown: Streptococcus phage Javan405 sequence
ccttgaagatgcgaaaggactctag

SEQ ID NO: 39173 - DNA, 25 bp, Unknown
  Description of Unknown: Streptococcus phage Javan575 sequence
cctcaattgcgaggtggcgattttt

SEQ ID NO: 39174 - DNA, 25 bp, Unknown
  Description of Unknown: Streptococcus phage Javan424 sequence
atctcaattgaggtggcgatttttt

SEQ ID NO: 39175 - DNA, 25 bp, Unknown
  Description of Unknown: Streptococcus phage Javan618 sequence
tcaatttctgaggtggcgatttttt

SEQ ID NO: 39176 - DNA, 25 bp, Unknown
  Description of Unknown: Streptococcus phage Javan638 sequence
catctcaattgaggtggcgattttt

SEQ ID NO: 39177 - DNA, 24 bp, Unknown
  Description of Unknown: Streptococcus phage phi-SsuSSJ27_rum sequence
ttatcttggactattttcttagcc

SEQ ID NO: 39178 - DNA, 25 bp, Unknown
  Description of Unknown: Streptococcus phage phi-SsuSSJ28_rum sequence
gtggtcccaaaatagaaagtagaat

SEQ ID NO: 39179 - DNA, 25 bp, Unknown
  Description of Unknown: Streptococcus phage Javan239 sequence
ctcaattacgaggtggcgatttttt

SEQ ID NO: 39180 - DNA, 25 bp, Unknown
  Description of Unknown: Streptococcus phage Javan101 sequence
attgggtagtgaaccgttttttgtg

SEQ ID NO: 39181 - DNA, 25 bp, Unknown
  Description of Unknown: Erysipelothrix phage phi1605 sequence
aaatgatgggacgaagctattatgc

SEQ ID NO: 39182 - DNA, 25 bp, Unknown
  Description of Unknown: Streptomyces phage SV1 sequence
ggggtccggcaggaacagccgccag

SEQ ID NO: 39183 - DNA, 25 bp, Unknown
  Description of Unknown: Clostridium phage HM T sequence
ctgcagtggcagcaaaatcaatgtt

SEQ ID NO: 39184 - DNA, 25 bp, Unknown
  Description of Unknown: Streptococcus phage Javan255 sequence
tcctcatcactctttattttttgaa

SEQ ID NO: 39185 - DNA, 25 bp, Unknown
  Description of Unknown: Streptococcus phage Javan639 sequence
aagacaagatgtgtcaattcggcac

SEQ ID NO: 39186 - DNA, 25 bp, Unknown
  Description of Unknown: Streptococcus phage Javan122 sequence
ttatgtgtgcgttgcctaaaaaatg

SEQ ID NO: 39187 - DNA, 25 bp, Unknown
  Description of Unknown: Streptococcus phage Javan261 sequence
tctggctgttttttatgaatggaat

SEQ ID NO: 39188 - DNA, 25 bp, Unknown
  Description of Unknown: Faecalibacterium phage FP_Epona sequence
tgctatatctgctattctgttacgc

SEQ ID NO: 39189 - DNA, 25 bp, Unknown
  Description of Unknown: Faecalibacterium phage FP_Toutatis sequence
ccccattcaagcgcgctaccaaaac

SEQ ID NO: 39190 - DNA, 25 bp, Unknown
  Description of Unknown: Streptococcus phage Javan422 sequence
atggcttttttgtgattagcaaaag

SEQ ID NO: 39191 - DNA, 25 bp, Unknown
  Description of Unknown: Caldibacillus phage CBP1 sequence
gagcgtttttgttttgcaaagggta

SEQ ID NO: 39192 - DNA, 25 bp, Unknown
  Description of Unknown: Clostridium phage phiCT9441A sequence
ctattcctattggatcttgaagata

SEQ ID NO: 39193 - DNA, 25 bp, Unknown
  Description of Unknown: Streptococcus phage Javan215 sequence
aggattttagtgtcattgattcaat

SEQ ID NO: 39194 - DNA, 25 bp, Unknown
  Description of Unknown: Streptococcus phage Javan202 sequence
aggattttagtgccattgattcaat

SEQ ID NO: 39195 - DNA, 25 bp, Unknown
  Description of Unknown: Streptococcus phage Javan444 sequence
agaaatttactatcctacatttcaa

SEQ ID NO: 39196 - DNA, 24 bp, Unknown
  Description of Unknown: Streptococcus phage phiARI0004 sequence
ttcgctcacaataagagagaactt

SEQ ID NO: 39197 - DNA, 25 bp, Unknown
  Description of Unknown: Streptococcus phage Javan241 sequence
gcgcaaaaaacaaacaaatttagat

SEQ ID NO: 39198 - DNA, 25 bp, Unknown
  Description of Unknown: Streptococcus phage Javan206 sequence
caaatttagtatcattcatttccac

SEQ ID NO: 39199 - DNA, 25 bp, Unknown
  Description of Unknown: Streptococcus phage Javan394 sequence
agtgtttaacttacacttatctcta

SEQ ID NO: 39200 - DNA, 25 bp, Unknown
  Description of Unknown: Paenibacillus phage phiERICV sequence
ggacatcctttgatcgcgtataccg

SEQ ID NO: 39201 - DNA, 25 bp, Unknown
  Description of Unknown: Streptococcus phage Javan247 sequence
ccctgttttgctaccgagtattaag

SEQ ID NO: 39202 - DNA, 25 bp, Unknown
  Description of Unknown: Streptococcus phage Javan645 sequence
atgtatcaagtgaacactattaata

SEQ ID NO: 39203 - DNA, 25 bp, Unknown
  Description of Unknown: Streptococcus phage Javan116 sequence
cggtattgtatcaagttaatcagaa

SEQ ID NO: 39204 - DNA, 25 bp, Unknown
  Description of Unknown: Streptococcus phage Javan210 sequence
aattacagtatttaggagcacctac

SEQ ID NO: 39205 - DNA, 25 bp, Unknown
  Description of Unknown: Streptococcus phage Javan284 sequence
aattactgtatttaggagcaccgac

SEQ ID NO: 39206 - DNA, 25 bp, Unknown
  Description of Unknown: Streptococcus phage Javan117 sequence
agcattatttaggtactacaactag

SEQ ID NO: 39207 - DNA, 25 bp, Unknown
  Description of Unknown: Acidithiobacillus phage AcaML1 sequence
aggcggcgggaatcgaacccgcgtc

SEQ ID NO: 39208 - DNA, 25 bp, Unknown
  Description of Unknown: Streptococcus phage phiJH1301-2 sequence
cgcatatctccttaaaaattttttc

SEQ ID NO: 39209 - DNA, 25 bp, Unknown
  Description of Unknown: Streptococcus phage Javan123 sequence
agtagacgaaaggctgtaacaaaag

SEQ ID NO: 39210 - DNA, 25 bp, Unknown
  Description of Unknown: Streptococcus phage Javan369 sequence
gtgactgtgactgaaaggttgcagt

SEQ ID NO: 39211 - DNA, 25 bp, Unknown
  Description of Unknown: Streptococcus phage Javan405 sequence
aaaagacaaagtcagtatagacttt

SEQ ID NO: 39212 - DNA, 25 bp, Unknown
  Description of Unknown: Streptococcus phage Javan575 sequence
gcactgatattttggaaagaactta

SEQ ID NO: 39213 - DNA, 25 bp, Unknown
  Description of Unknown: Streptococcus phage Javan424 sequence
gagactgcgaccgaaaggttgcgtt

SEQ ID NO: 39214 - DNA, 25 bp, Unknown
  Description of Unknown: Streptococcus phage Javan618 sequence
ggaattattctcctttcgaataaga

SEQ ID NO: 39215 - DNA, 25 bp, Unknown
  Description of Unknown: Streptococcus phage Javan638 sequence
gatactgcgaccgaaaggttgcggt

SEQ ID NO: 39216 - DNA, 25 bp, Unknown
  Description of Unknown: Streptococcus phage phi-SsuSSJ27_rum sequence
cgcatatctccttaaaaattttttc

SEQ ID NO: 39217 - DNA, 25 bp, Unknown
  Description of Unknown: Streptococcus phage phi-SsuSSJ28_rum sequence
ttttgagaagtcatcaaagtagtaa

SEQ ID NO: 39218 - DNA, 25 bp, Unknown
  Description of Unknown: Streptococcus phage Javan239 sequence
taagttaagaaaaaaatgaaactca

SEQ ID NO: 39219 - DNA, 25 bp, Unknown
  Description of Unknown: Streptococcus phage Javan101 sequence
ctttaaaaatggcttacggattgat

SEQ ID NO: 39220 - DNA, 24 bp, Unknown
  Description of Unknown: Erysipelothrix phage phi1605 sequence
tggaagaaatgacgcgtctgtaaa

SEQ ID NO: 39221 - DNA, 24 bp, Unknown
  Description of Unknown: Streptomyces phage SV1 sequence
acccacgtcagtggatctaaagga

SEQ ID NO: 39222 - DNA, 24 bp, Unknown
  Description of Unknown: Clostridium phage HM T sequence
aaatgctcggtacatgaaaaagcg

SEQ ID NO: 39223 - DNA, 24 bp, Unknown
  Description of Unknown: Streptococcus phage Javan255 sequence
ttagtctttttggtagaaggaaca

SEQ ID NO: 39224 - DNA, 24 bp, Unknown
  Description of Unknown: Streptococcus phage Javan639 sequence
ctagtctttctgatagaatgagca

SEQ ID NO: 39225 - DNA, 24 bp, Unknown
  Description of Unknown: Streptococcus phage Javan122 sequence
ctagtctttttgatagaaaaagca

SEQ ID NO: 39226 - DNA, 24 bp, Unknown
  Description of Unknown: Streptococcus phage Javan261 sequence
ctagttaatttcaaaatatctcaa

SEQ ID NO: 39227 - DNA, 24 bp, Unknown
  Description of Unknown: Faecalibacterium phage FP_Epona sequence
ttgtgcattgtacaccttgataac

SEQ ID NO: 39228 - DNA, 24 bp, Unknown
  Description of Unknown: Faecalibacterium phage FP_Toutatis sequence
atgatctataccgtaggcgaaatg

SEQ ID NO: 39229 - DNA, 24 bp, Unknown
  Description of Unknown: Streptococcus phage Javan422 sequence
ttaatcccccttaacagtttccat

SEQ ID NO: 39230 - DNA, 24 bp, Unknown
  Description of Unknown: Caldibacillus phage CBP1 sequence
aatggaatatcatctgaaatctcg

SEQ ID NO: 39231 - DNA, 24 bp, Unknown
  Description of Unknown: Clostridium phage phiCT9441A sequence
tatttcattacctcttacatgtta

SEQ ID NO: 39232 - DNA, 24 bp, Unknown
  Description of Unknown: Streptococcus phage Javan215 sequence
ttataaatttttttcacgttcgga

SEQ ID NO: 39233 - DNA, 24 bp, Unknown
  Description of Unknown: Streptococcus phage Javan202 sequence
ttatcgtttcctagtcgggtattt

SEQ ID NO: 39234 - DNA, 24 bp, Unknown
  Description of Unknown: Streptococcus phage Javan444 sequence
ctaaactggttttttagagattgt

SEQ ID NO: 39235 - DNA, 24 bp, Unknown
  Description of Unknown: Streptococcus phage phiARI0004 sequence
caccaacatctcaatcaaggatag

SEQ ID NO: 39236 - DNA, 24 bp, Unknown
  Description of Unknown: Streptococcus phage Javan241 sequence
ttatttaaatgtaccccaagcgtc

SEQ ID NO: 39237 - DNA, 24 bp, Unknown
  Description of Unknown: Streptococcus phage Javan206 sequence
aaatgaaaaatcctttcaaatacg

SEQ ID NO: 39238 - DNA, 24 bp, Unknown
  Description of Unknown: Streptococcus phage Javan394 sequence
ttacatttcctcagcatcaataag

SEQ ID NO: 39239 - DNA, 24 bp, Unknown
  Description of Unknown: Paenibacillus phage phiERICV sequence
ctcctcatgcatatgataagtaat

SEQ ID NO: 39240 - DNA, 24 bp, Unknown
  Description of Unknown: Streptococcus phage Javan247 sequence
ttatgatagttcgccccaaaggtc

SEQ ID NO: 39241 - DNA, 24 bp, Unknown
  Description of Unknown: Streptococcus phage Javan645 sequence
aattattcatatttgccatttaaa

SEQ ID NO: 39242 - DNA, 24 bp, Unknown
  Description of Unknown: Streptococcus phage Javan116 sequence
tcaaaatgtatcaaagtcgtccga

SEQ ID NO: 39243 - DNA, 24 bp, Unknown
  Description of Unknown: Streptococcus phage Javan210 sequence
ttataaatttttttcacgttcgga

SEQ ID NO: 39244 - DNA, 24 bp, Unknown
  Description of Unknown: Streptococcus phage Javan284 sequence
ttaagcttgtaatttcatttcaag

SEQ ID NO: 39245 - DNA, 24 bp, Unknown
  Description of Unknown: Streptococcus phage Javan117 sequence
aaatgaaaatcaacgtaacaagct

SEQ ID NO: 39246 - DNA, 24 bp, Unknown
  Description of Unknown: Acidithiobacillus phage AcaML1 sequence
taaatggtggcggaacacggaacc

SEQ ID NO: 39247 - DNA, 24 bp, Unknown
  Description of Unknown: Streptococcus phage phiJH1301-2 sequence
tatgttaaagaaaaacgatattgt

SEQ ID NO: 39248 - DNA, 24 bp, Unknown
  Description of Unknown: Streptococcus phage Javan123 sequence
ctaatctttctgatagaataagca

SEQ ID NO: 39249 - DNA, 24 bp, Unknown
  Description of Unknown: Streptococcus phage Javan369 sequence
ctaatctttctgatagaatatgca

SEQ ID NO: 39250 - DNA, 24 bp, Unknown
  Description of Unknown: Streptococcus phage Javan405 sequence
atgacagataaacaacacgctctc

SEQ ID NO: 39251 - DNA, 24 bp, Unknown
  Description of Unknown: Streptococcus phage Javan575 sequence
gctaatctttctgatagaataagc

SEQ ID NO: 39252 - DNA, 24 bp, Unknown
  Description of Unknown: Streptococcus phage Javan424 sequence
tcagtctttttgatagaagaaaca

SEQ ID NO: 39253 - DNA, 24 bp, Unknown
  Description of Unknown: Streptococcus phage Javan618 sequence
ctaatctttctgatagaataagca

SEQ ID NO: 39254 - DNA, 24 bp, Unknown
  Description of Unknown: Streptococcus phage Javan638 sequence
gtcagtctttttgatagaagagac

SEQ ID NO: 39255 - DNA, 24 bp, Unknown
  Description of Unknown: Streptococcus phage phi-SsuSSJ27_rum sequence
atatgaaccctttctaatgtgagt

SEQ ID NO: 39256 - DNA, 24 bp, Unknown
  Description of Unknown: Streptococcus phage phi-SsuSSJ28_rum sequence
atgttaaagaaaaacgatattgtc

SEQ ID NO: 39257 - DNA, 24 bp, Unknown
  Description of Unknown: Streptococcus phage Javan239 sequence
ctagtctttttgatagaaaaagca

SEQ ID NO: 39258 - DNA, 24 bp, Unknown
  Description of Unknown: Streptococcus phage Javan101 sequence
ctagtccttctgatagaagaggca

SEQ ID NO: 39259 - DNA, 25 bp, Unknown
  Description of Unknown: Erysipelothrix phage phi1605 sequence
tggaattcaagttaaatatcctaca

SEQ ID NO: 39260 - DNA, 25 bp, Unknown
  Description of Unknown: Streptomyces phage SV1 sequence
gcgagtcctttagagacactgaccc

SEQ ID NO: 39261 - DNA, 24 bp, Unknown
  Description of Unknown: Clostridium phage HM T sequence
tctttaatgtagcgcccaaatgct

SEQ ID NO: 39262 - DNA, 24 bp, Unknown
  Description of Unknown: Streptococcus phage Javan255 sequence
gtggtcaggaaattatcatttgat

SEQ ID NO: 39263 - DNA, 25 bp, Unknown
  Description of Unknown: Streptococcus phage Javan639 sequence
aaaatggtgttcggattgatttata

SEQ ID NO: 39264 - DNA, 25 bp, Unknown
  Description of Unknown: Streptococcus phage Javan122 sequence
tttcgaaactcttaggtagagtgta

SEQ ID NO: 39265 - DNA, 25 bp, Unknown
  Description of Unknown: Streptococcus phage Javan261 sequence
aaaacggtcaggttatcgaaatata

SEQ ID NO: 39266 - DNA, 25 bp, Unknown
  Description of Unknown: Faecalibacterium phage FP_Epona sequence
aaaacttacgtttttcaggtggctt

SEQ ID NO: 39267 - DNA, 24 bp, Unknown
  Description of Unknown: Faecalibacterium phage FP_Toutatis sequence
agaatcgaactcacggcctcttga

SEQ ID NO: 39268 - DNA, 24 bp, Unknown
  Description of Unknown: Streptococcus phage Javan422 sequence
aacgaacaagtcatatctatgtga

SEQ ID NO: 39269 - DNA, 25 bp, Unknown
  Description of Unknown: Caldibacillus phage CBP1 sequence
aaatcctttataaattcaaggttta

SEQ ID NO: 39270 - DNA, 24 bp, Unknown
  Description of Unknown: Clostridium phage phiCT9441A sequence
tagggtatttcattgccttcttta

SEQ ID NO: 39271 - DNA, 25 bp, Unknown
  Description of Unknown: Streptococcus phage Javan215 sequence
atatcaaaattatttttgattttta

SEQ ID NO: 39272 - DNA, 25 bp, Unknown
  Description of Unknown: Streptococcus phage Javan202 sequence
atatcaaaattatttttgattttta

SEQ ID NO: 39273 - DNA, 25 bp, Unknown
  Description of Unknown: Streptococcus phage Javan444 sequence
acattgctatcaagtggaagatata

SEQ ID NO: 39274 - DNA, 25 bp, Unknown
  Description of Unknown: Streptococcus phage phiARI0004 sequence
cttaccgaatgcaacacgagatcac

SEQ ID NO: 39275 - DNA, 25 bp, Unknown
  Description of Unknown: Streptococcus phage Javan241 sequence
atatcgagatcaagtggagaatttg

SEQ ID NO: 39276 - DNA, 25 bp, Unknown
  Description of Unknown: Streptococcus phage Javan206 sequence
gtatcaaaattttatggaaaattta

SEQ ID NO: 39277 - DNA, 25 bp, Unknown
  Description of Unknown: Streptococcus phage Javan394 sequence
acatggaaattttatttaaaaaata

SEQ ID NO: 39278 - DNA, 24 bp, Unknown
  Description of Unknown: Paenibacillus phage phiERICV sequence
tcgtatcaatggatcctcatgcat

SEQ ID NO: 39279 - DNA, 25 bp, Unknown
  Description of Unknown: Streptococcus phage Javan247 sequence
gcattgatatttttttcaattttta

SEQ ID NO: 39280 - DNA, 25 bp, Unknown
  Description of Unknown: Streptococcus phage Javan645 sequence
gaattgatatatttttgaattttta

SEQ ID NO: 39281 - DNA, 25 bp, Unknown
  Description of Unknown: Streptococcus phage Javan116 sequence
gcatagatttaatgctagatatata

SEQ ID NO: 39282 - DNA, 25 bp, Unknown
  Description of Unknown: Streptococcus phage Javan210 sequence
aaatcaacgttatttttaaattgta

SEQ ID NO: 39283 - DNA, 25 bp, Unknown
  Description of Unknown: Streptococcus phage Javan284 sequence
aaatcaacgttatttttaaattgta

SEQ ID NO: 39284 - DNA, 24 bp, Unknown
  Description of Unknown: Streptococcus phage Javan117 sequence
atcgatattatttttaagttttaa

SEQ ID NO: 39285 - DNA, 25 bp, Unknown
  Description of Unknown: Acidithiobacillus phage AcaML1 sequence
aagggttggccttgggtaaatggtg

SEQ ID NO: 39286 - DNA, 25 bp, Unknown
  Description of Unknown: Streptococcus phage phiJH1301-2 sequence
gtttgataggtttcttgataagtca

SEQ ID NO: 39287 - DNA, 25 bp, Unknown
  Description of Unknown: Streptococcus phage Javan123 sequence
tagaggggactgaggtagaattata

SEQ ID NO: 39288 - DNA, 25 bp, Unknown
  Description of Unknown: Streptococcus phage Javan369 sequence
tagaggggacagaggtagacttgta

SEQ ID NO: 39289 - DNA, 24 bp, Unknown
  Description of Unknown: Streptococcus phage Javan405 sequence
aaaattgaaaaactagttcattaa

SEQ ID NO: 39290 - DNA, 25 bp, Unknown
  Description of Unknown: Streptococcus phage Javan575 sequence
gaagaatggtgaccggtcataatta

SEQ ID NO: 39291 - DNA, 25 bp, Unknown
  Description of Unknown: Streptococcus phage Javan424 sequence
tcgaaggaacagaagttgacttata

SEQ ID NO: 39292 - DNA, 25 bp, Unknown
  Description of Unknown: Streptococcus phage Javan618 sequence
atgtcctggtcacttaaattcttca

SEQ ID NO: 39293 - DNA, 25 bp, Unknown
  Description of Unknown: Streptococcus phage Javan638 sequence
tggaaggaacagaagtcgacctgta

SEQ ID NO: 39294 - DNA, 25 bp, Unknown
  Description of Unknown: Streptococcus phage phi-SsuSSJ27_rum sequence
gtttgataggtttcttgataagtca

SEQ ID NO: 39295 - DNA, 25 bp, Unknown
  Description of Unknown: Streptococcus phage phi-SsuSSJ28_rum sequence
gtgtgagaagtgaagttggggaatg

SEQ ID NO: 39296 - DNA, 25 bp, Unknown
  Description of Unknown: Streptococcus phage Javan239 sequence
attgtgagttagtgggtacggatta

SEQ ID NO: 39297 - RNA, 10 nt, Artificial Sequence
  Description of Artificial Sequence: Synthetic oligonucleotide
aaaaaaaaaa

SEQ ID NO: 39298 - RNA, 20 nt, Artificial Sequence
  Description of Artificial Sequence: Synthetic oligonucleotide
aaaaaaaaaaaaaaaaaaaa

SEQ ID NO: 39299 - RNA, 30 nt, Artificial Sequence
  Description of Artificial Sequence: Synthetic oligonucleotide
aaaaaaaaaaaaaaaaaaaaaaaaaaaaaa

SEQ ID NO: 39300 - RNA, 50 nt, Artificial Sequence
  Description of Artificial Sequence: Synthetic oligonucleotide
aaaaaaaaaaaaaaaaaaaaaaaaaaaaaaaaaaaaaaaaaaaaaaaaaa

SEQ ID NO: 39301 - RNA, 70 nt, Artificial Sequence
  Description of Artificial Sequence: Synthetic oligonucleotide
aaaaaaaaaaaaaaaaaaaaaaaaaaaaaaaaaaaaaaaaaaaaaaaaaaaaaaaaaaaaaaaaaaaaaa

SEQ ID NO: 39302 - RNA, 100 nt, Artificial Sequence
  Description of Artificial Sequence: Synthetic polynucleotide
aaaaaaaaaaaaaaaaaaaaaaaaaaaaaaaaaaaaaaaaaaaaaaaaaaaaaaaaaaaaaaaaaaaaaaaaaaaaaaaaaaaaaaaaaaaaaaaaaaaa
